(19) United States
(12) Patent Application Publication
(10) Pub. No.: US 2017/0273917 A1
(43) Pub. Date: Sep. 28, 2017

(54) NMDA RECEPTOR ANTAGONISTS FOR TREATING GAUCHER DISEASE

(71) Applicant: Yeda Research and Development Co. Ltd., Rehovot (IL)

(72) Inventors: Anthony FUTERMAN, Rehovot (IL); Andres David KLEIN, Rehovot (IL)

(21) Appl. No.: 15/511,033

(22) PCT Filed: Sep. 10, 2015
(86) PCT No.: PCT/IL2015/050931

§ 371 Date: Mar. 14, 2017

(30) Foreign Application Priority Data
Sep. 14, 2014 (IL) 234638

(51) Int. Cl. A61K 31/13; G01N 33/50; A61K 49/00; C12Q 1/68

(52) U.S. Cl. CPC A61K 31/13; C12Q 1/6883; G01N 33/5058; A61K 49/0004; G01N 33/50; C12Q 2600/178; G01N 2800/28; G01N 2800/2842; C12Q 2600/112; C12Q 2600/156

(57) ABSTRACT

The present invention provides pharmaceutical compositions comprising at least one NMDA receptor antagonist for use in treating neuropathic forms of Gaucher Disease (nGD).

### FIELD OF THE INVENTION

[0001] The present invention relates to compositions comprising NMDA receptor antagonists for use in the treatment of neuropathic forms of Gaucher Disease.

### BACKGROUND OF THE INVENTION

### Gaucher Disease

[0002] Lysosomal storage disorders (LSDs) encompass about 50 different inherited diseases. They are caused by deficiencies in lysosomal enzymes or transporters, resulting in intra-lysosomal accumulation of undegraded metabolites. While LSDs are individually rare, collectively they have a very high prevalence in the population, of about 1/7000 newborns (Fuller et al., 2006). This frequency is comparable to that of the most common genetic diseases (Walker, 2007; Ratjen and Doring, 2003).

[0003] Among the LSDs, Gaucher Disease (GD) is the most prevalent, with an overall frequency of 1 in 40,000, but in Ashkenazi Jews, as many as 1 in 500 are affected (Fuller et al., 2006). GD is caused by mutations in the GBA1 gene, which encodes β-glucocerebrosidase (also called acid β-glucosidase, D-glucosyl-N-acylsphingosine glucohydrolase, or GCase), a lysosome enzyme with glucosylceramidase activity that is needed to cleave, by hydrolysis, the beta-glucosidic linkage of glucosylceramide (GlcCer, also called glucocerebroside), an intermediate in glycolipid metabolism. As a consequence, cells accumulate large quantities of GlcCer, and eventually die.

[0004] From a clinical perspective, GD can be divided into three sub-types based on age of onset and on signs of nervous system involvement. The major symptoms of Type 1 are enlargement of spleen and liver, anaemia, thrombocytopenia, and skeletal lesions. Type 2 and 3, the neuropathic forms of GD (nGD), are classified according to the time of onset and rate of progression of neurological symptoms. Type 2, the acute neuropathic form, usually refers to children who display neurological abnormalities before 6 months of age and die by age 2-4 years of age. In Type 3, the sub-acute, chronic neuropathic form, patients present with similar symptoms to those observed in Type 2, but with a later onset and severity (Cox, 2010).

### Gaucher Disease Treatments

[0005] Type 1 patients can be treated with Enzyme Replacement Therapies (ERT). Treatments and drugs for GD Type 1, the most common form of the disease, may vary depending on the severity of each patient's disease and the course of treatment determined by a physician.

[0006] There are three ERTs available for treatment of GD and one oral medication which may be taken by those over 18-years-old and/or have a mild form of GD. In 1991, the Genzyme Corporation in cooperation with the NIH developed the first FDA-approved GD targeted ERT. With the introduction of freeze-dried analogue of human β-glucocerebrosidase (trade name CEREZYME®) and its ready-to-use formulation (Imiglucerase) in 1994, clinicians have been able to address the disease process itself, and therefore alleviate and even reverse many effects of Type 1 GD. CEREZYME® therapy is not a cure for GD; that is, it does not correct the underlying genetic defect. In order to continue to benefit from the treatment, symptomatic patients must receive intravenous infusions for the rest of their lives. The history and current perspective of CEREZYME® and Imiglucerase in the treatment of GD were recently reviewed (Deegan and Cox, 2012).

[0007] Taliglucerase alfa (trade name ELELYSO™) for injection is a plant-derived hydrolytic lysosomal glucocerebroside-specific enzyme indicated for long-term ERT for adults with a confirmed diagnosis of Type 1 GD. ELELYSO™ was approved by the United States Food and Drug Administration (FDA) on May 1, 2012, and is the first plant cell-based FDA-approved ERT indicated for the treatment of Type 1 GD. The benefits of taliglucerase alfa in the treatment of patients with GD were recently reviewed (Hollak, 2012).

[0008] Velaglucerase alfa (trade name VPRIV®) is a hydrolytic lysosomal glucocerebroside-specific enzyme indicated for long-term ERT for pediatric and adult patients with Type 1 GD. Velaglucerase alfa is derived from a human cell line and designed to have an amino acid sequence similar to the naturally occurring human β-glucocerebrosidase protein. It was approved for use by FDA on Feb. 26, 2010. The results from a randomized, double-blind, multinational, Phase 3 study of ERT with velaglucerase alfa in GD, were recently published (Gonzalez et al., 2013). The safety and efficacy results of velaglucerase alfa in this study have supported the approval of velaglucerase alfa in the United States and Europe and the emergence of a valuable treatment option for patients with Type 1 GD.

[0009] In addition to the aforementioned ERT drugs, Miglustat (OGT 918, N-butyl-deoxynojirimycin, ZAVESCA®) is a prescription substrate reduction therapy (SRT) medicine taken by mouth for adults with mild to moderate Type 1 GD. ZAVESCA® is used only in patients who cannot be treated with ERT. ZAVESCA® reduces the harmful buildup of glycosphingolipids (GSLs) throughout the body by reducing the amount of GSLs that the body produces. A retrospective analysis of miglustat for Type 1 GD has found that a combination therapy may offer GD patients better disease control (by employing more than one mechanism of action against the accumulation of glucosylceramide in cells), can be cost-effective by using reduced doses of both ERT and miglustat, and can provide an acceptable quality of life (Machaczka et al., 2012).

### Genome-Wide Association Study

[0010] Genotype-phenotype correlations are rather poor for GD and therefore predicting what subtype of GD a patient will develop is a major challenge (Goker-Alpan et al 2005); for example, siblings with the same genotype can present with widely-differing phenotypes (Eyal et al 1991, Amato et al 2004). Therefore, a role for modifier genes has been proposed as the underlying basis of phenotypic variation (Goker-Alpan et al 2005).

[0011] Modifier genes can be identified by at least two independent strategies:

[0012] i) Search for changes in genes that are involved in the development of specific symptoms. Using this strategy, SCARB2 was identified as a modifier gene of GD in a pair of siblings with discordant epileptic phenotypes (Velayati et al 2011); and

[0013] ii) Genome Wide Association Studies. Genome-wide association study (GWA study, or GWAS), also known as whole genome association study (WGA study, or WGAS), is an examination of many common genetic variants in different individuals to see if any variant is associated with a trait. GWAS typically focus on associations between single-nucleotide polymorphisms (SNPs) and traits like major diseases. GWAS normally compare the DNA of two groups of participants: people with the disease (cases) and similar people without (controls). Each person gives a sample of DNA, from which millions of genetic variants are read. If one type of the variant (one allele) is more frequent in people with the disease, the SNP is said to be “associated” with the disease. The associated SNPs are then considered to mark a region of the human genome which influences the risk of disease.

[0014] The GWAS approach was recently utilized in the study of Ashkenazi Jewish GD patients with Type 1 GD (GD1), homozygous for N370S mutation. The study revealed the candidacy of the CLN8 gene as a genetic modifier contributing to extreme phenotypic variation (Zhang, 2012).

### NMDA Receptors

[0015] The NMDA receptor is a hetero-tetramer between two obligatory GluN1 (also denoted as NR1) and two regionally localized GluN2 subunits (also denoted as NR2). Multiple receptor isoforms with distinct brain distributions and functional properties arise by selective splicing of the NR1 transcripts and differential expression of the NR2 subunits. While a single NR2 subunit is found in invertebrate organisms, four distinct isoforms of the NR2 subunit are expressed in vertebrates and are referred to with the nomenclature NR2A through D (coded by genes GRIN2A, GRIN2B, GRIN2C and GRIN2D, respectively). Whereas NR2B is predominant in the early postnatal brain, the number of NR2A subunits grows, and eventually the NR2A subunits outnumber NR2B. This is called NR2B-NR2A developmental switch, and is notable because of the different kinetics each NR2 subunit lends to the receptor (Liu et al., 2004). Several synonyms exist for the NR2B protein, such as NMDAR2B; glutamate [NMDA] receptor subunit epsilon-2; glutamate receptor subunit epsilon-2; glutamate receptor, ionotropic, N-methyl D-aspartate 2B; GRIN2B; hNR3; MGC142178; MGC142180; N-methyl D-aspartate receptor subtype 2B; N-methyl-D-aspartate receptor subunit 3; NMDE2; or NR3. The protein comprises 1484 amino acids, of which the first 26 amino acids are thought to function as a potential signal peptide.

### Glutamate and NMDA Receptors

[0016] Glutamate is the major excitatory amino acid neurotransmitter in the brain (Nicholls et al., 2012). Under physiological conditions, glutamate plays fundamental roles in brain communication and plasticity (Bliss and Collingridge 1993; Cooke and Bliss 2006) through activation of glutamate receptors (GluRs) (Traynelis et al., 2010). Excessive activation of GluRs during neurological injuries produces an excess of calcium influx into the cells mainly via a subtype of GluRs called NMDA receptors, leading to neuronal damage and eventual cell death, a process called excitotoxicity (Mehta et al., 2013). NMDA receptors can be divided into 2 groups, according to their distribution in neurons: synaptic and extra-synaptic. The synaptic receptors promote survival signaling cascades while the extra-synaptic mediate the toxic effects of excitotoxicity (Parsons and Raymond, 2014). Excitotoxicity due to excessive glutamate release occurs in several neurological conditions, such as in ischemic stroke (Kostandy, 2005), autism (Essa et al., 2013), amyotrophic lateral sclerosis (Costa et al., 2010), Parkinson's (Caudle and Zhang, 2009) and Alzheimer's disease (Kostandy, 2005).

### Memantine and NMDA Receptors

[0017] Memantine was the first in a novel class of Alzheimer's disease medications acting on the glutamatergic system by blocking NMDA receptors. It was first synthesized by Eli Lilly and Company in 1968. Memantine has been shown to have a modest effect in moderate-to-severe Alzheimer's disease and in dementia with Lewy bodies and is approved for these uses in humans. U.S. Pat. No. 5,061,703 describes the use of memantine (and other adamantine derivatives) in prevention of ischemic damage to the brain. U.S. Pat. No. 8,168,209 and U.S. Pat. No. 8,329,752 describe extended release oral dosage forms of memantine. On 2003, the U.S. Food and Drug Administration (FDA) approved memantine (under the trade name NAMENDA) for treatment of moderate to severe Alzheimer's type dementia.

[0018] In summary, ERT is currently administered intravenously for the non-neurological manifestations of GD Types 1 and 3, and no treatments are yet available for Type 2, the most fatal form of the disease, which presents in infancy and causes demise within the first two to three years.

[0019] There thus remains an unmet medical need in the field for modes of therapy that would delay, ameliorate or diminish neurological symptoms that manifest themselves in the neuropathic forms of GD.

### SUMMARY OF THE INVENTION

[0020] The present invention provides compositions and methods for treatment of neuropathic forms of Gaucher Disease (GD) comprising as an active ingredient at least one type of NMDA receptor antagonist. The present invention provides compositions and methods effective in ameliorating, at least partially, the neurological onset and/or progression of the disease. In particular the compositions of the present invention diminish or prevent neurological symptoms of the disease. According to some embodiments, the NMDA antagonist is a specific inhibitor of glutamatergic neurotransmission. According to some embodiments, the NMDA antagonist may be a less specific antagonist that acts on other neurotransmission pathways. According to some embodiments, the NMDA antagonist may have additional activities such as serotonergic, cholinergic or dopaminergic antagonist or agonist activities.

[0021] The present invention is based, at least in part, on models of GD in inbred mice that disclosed for the first time that polymorphisms in the gene Grin2b, encoding for subunit B of the NMDA glutamate receptor, is associated with GD progression. To discover novel genes involved in GD progression, GD was induced in inbred mice strains by injecting conduritol B epoxide (CBE), an irreversible glucocerebrosidase (GBA) inhibitor, and performing a Genome Wide Association Study (GWAS). The GWAS analysis identified Grin2b, the gene encoding for the subunit B of the NMDA glutamate receptor, as a potential modifier gene of GD progression.

[0022] Thus, the present invention provides, in one aspect, a pharmaceutical composition comprising at least one NMDA receptor antagonist or a pharmaceutically acceptable salt, hydrate or pharmaceutically active enantiomer thereof, for use in treating a neuropathic form of Gaucher Disease (GD).

[0023] According to an aspect of some embodiments of the present invention there is provided an NMDA receptor antagonist for use in treating a neuropathic form of Gaucher Disease (GD).

[0024] The present invention further provides, in another aspect, a method for treating a neuropathic form of GD in a patient in need thereof, comprising the step of administering a pharmaceutical composition comprising at least one NMDA receptor antagonist or a pharmaceutically acceptable salt, hydrate or pharmaceutically active enantiomer thereof to the patient, thereby treating the neuropathic form of GD.

[0025] According to an aspect of some embodiments of the present invention there is provided a method for treating a neuropathic form of Gaucher Disease (GD) in a patient in need thereof, comprising administering a therapeutically effective amount of an NMDA receptor antagonist to the patient, thereby treating the neuropathic form of GD.

[0026] The present invention also provides, in an aspect, the use of at least one NMDA receptor antagonist or a pharmaceutically acceptable salt, hydrate or pharmaceutically active enantiomer thereof in the manufacture of a medicament for treating a neuropathic form of GD.

[0027] According to an aspect of some embodiments of the present invention there is provided a use of at least one NMDA receptor antagonist in the manufacture of a medicament for treating a neuropathic form of Gaucher Disease (GD).

[0028] The present invention further provides, in another aspect, a kit comprising at least one container comprising a pharmaceutical composition, the pharmaceutical composition comprising at least one NMDA receptor antagonist or a pharmaceutically acceptable salt, hydrate or pharmaceutically active enantiomer thereof, for use in treating neuropathic forms of GD.

[0029] According to some embodiments of the invention, the NMDA receptor antagonist or the use comprises an agent selected from the group consisting of an enzyme replacement therapy agent, substrate reduction therapy agent and pharmacological chaperone therapy agent.

[0030] According to some embodiments of the invention, the method comprising administering to the patient a therapeutically effective amount of an agent selected from the group consisting of an enzyme replacement therapy agent, substrate reduction therapy agent and pharmacological chaperone therapy agent.

[0031] According to an aspect of some embodiments of the present invention there is provided a kit identified for use in treating neuropathic form of Gaucher Disease (GD), comprising a packaging material packaging an NMDA receptor antagonist and an agent selected from the group consisting of an enzyme replacement therapy agent, substrate reduction therapy agent and pharmacological chaperone therapy agent.

[0032] According to some embodiments of the invention, the NMDA receptor is an extra-synaptic NMDA receptor.

[0033] According to some embodiments of the invention, the NMDA receptor comprises a NR2B subunit.

[0034] In certain embodiments, the NMDA receptor antagonist preferentially binds to extra-synaptic NMDA receptors. In certain embodiments, the extra-synaptic NMDA receptors comprise a NR2B subunit.

[0035] In certain embodiments, the NMDA receptor antagonist binds to an NMDA receptor of a neuronal cell having β-glucocerebrosidase activity deficiency relative to corresponding healthy neuronal cells. In certain embodiments, the cell comprises a mutation in the GBA1 gene. In certain embodiments, the cell expresses a mutated β-glucocerebrosidase enzyme. In certain embodiments, the neuronal cell is a central nervous system (CNS) neuron.

[0036] In certain embodiments, the NMDA receptor antagonist is selected from the group consisting of memantine, nitromemantine, neramexane, ketamine, amantadine, dextromethorphan, L-687,384, amitriptyline, 1-benzyl-6′-methoxy-6′,7′-dihydrospiro[piperidine-4,4′-thieno[3.2-c]pyran], ifenprodil, orphenadrine, kynurenic acid, felbamate, D(−)-AP-5, (±)-CPP, EAA-090, TCN-201, AP-5, AZD6765, SDZ 220-581, (±)-norketamine, eliprodil, dextrorphan, 5,7-dichlorokynurenic acid monohydrate, [Glu3,4,7,10,14]-Conantokin G, D-AP-7, MD-Ada, AP-7, Ro 8-4304, spermine, Ro 25-6981, DCQX, traxoprodil, MDL 105,519, fanapanel, metaphit, Ro 25-6981, NAAG, 5-fluoroindole-2-carboxylic acid, (S)-(−)-4-oxo-2-azetidinecarboxylic acid, benzyl (S)-(−)-4-oxo-2-azetidinecarboxylate and (±)-α-amino-3-carbomethoxy-5-methylisoxazole-4-propanoic acid, and pharmaceutically acceptable salts, hydrates and pharmaceutically active enantiomers thereof. Each possibility represents a separate embodiment of the invention.

[0037] In certain embodiments, the NMDA receptor antagonist is selected from the group consisting of memantine, nitromemantine, neramexane, ketamine, amantadine, dextromethorphan, L-687,384, amitriptyline, 1-benzyl-6′-methoxy-6′,7′-dihydrospiro-[piperidine-4,4′-thieno[3.2-c]pyran], eliprodil, ifenprodil, orphenadrine, kynurenic acid, felbamate, and pharmaceutically acceptable salts, hydrates and pharmaceutically active enantiomers thereof. Each possibility represents a separate embodiment of the invention.

[0038] In certain embodiments, the NMDA receptor antagonist is selected from the group consisting of memantine, nitromemantine, neramexane, and pharmaceutically acceptable salts, hydrates and pharmaceutically active enantiomers thereof. Each possibility represents a separate embodiment of the invention.

[0039] According to some embodiments of the invention, the NMDA receptor antagonist is selected from the group consisting of memantine, eliprodil and ifenprodil or a pharmaceutically acceptable salt, hydrate or pharmaceutically active enantiomer thereof.

[0040] In certain embodiments, the NMDA receptor antagonist is memantine (3,5-dimethyl-1-adamantanamine hydrochloride) or a pharmaceutically acceptable salt, hydrate or pharmaceutically active enantiomer thereof.

[0041] In certain embodiments, the NMDA receptor antagonist also has serotonergic activity. In certain embodiments, the NMDA receptor antagonist is also a 5-HT₃ receptor antagonist.

[0042] In certain embodiments, the NMDA receptor antagonist also has cholinergic activity. In certain embodiments, the NMDA receptor antagonist is also a nicotinic acetylcholine receptor (nAChR) antagonist.

[0043] In certain embodiments, the NMDA receptor antagonist having nAChR antagonist activity is selected from the group consisting of amantadine and dextromethorphan, and pharmaceutically acceptable salts, hydrates and pharmaceutically active enantiomers thereof. Each possibility represents a separate embodiment of the invention.

[0044] In certain embodiments, the NMDA receptor antagonist also has dopaminergic activity. In certain embodiments, the NMDA receptor antagonist is also a dopamine D₂ receptor agonist.

[0045] In certain embodiments, the NMDA receptor antagonist also has neuro-protective activity. In certain embodiments, the NMDA receptor antagonist is also a sigma-1 receptor agonist.

[0046] In certain embodiments, the NMDA receptor antagonist having sigma-1 receptor agonist activity is selected from the group consisting of L-687,384, amitriptyline and 1-benzyl-6′-methoxy-6′,7′-dihydrospiro[piperidine-4,4′-thieno[3.2-c]pyran], and pharmaceutically acceptable salts, hydrates and pharmaceutically active enantiomers thereof. Each possibility represents a separate embodiment of the invention.

[0047] In certain embodiments, the NMDA receptor antagonist has neuro-protective activity.

[0048] In certain embodiments, the pharmaceutical composition described above is for use in treating sub-acute, chronic neuropathic GD Type 3.

[0049] According to some embodiments of the invention, the GD is sub-acute, chronic neuropathic GD Type 3.

[0050] In certain embodiments, the GD Type 3 is GD Type 3a.

[0051] In certain embodiments, the GD Type 3 is GD Type 3b.

[0052] According to some embodiments of the invention, the NMDA receptor antagonist is formulated for oral delivery.

[0053] In certain embodiments, the pharmaceutical composition described above is formulated for oral delivery. In certain embodiments the composition for oral delivery is formulated for sustained release.

[0054] According to some embodiments of the invention, the NMDA receptor antagonist is formulated for injection.

[0055] In certain embodiments, the pharmaceutical composition described above is formulated for injection.

[0056] According to an aspect of some embodiments of the present invention there is provided a method of diagnosing neuropathic form of Gaucher Disease (GD) in a patient, the method comprising determining in a biological sample of the patient a sequence variation that affects an amount of an expression product of a Grin2B gene and/or an amount of an expression product of a Grin2B gene, wherein presence of the sequence variation, an amount of the expression product above a predetermined level and/or increased amount of the expression product relative to a biological sample of a healthy patient or a patient diagnosed with GD type I is indicative of a neuropathic form of GD, thereby diagnosing neuropathic form of GD in the patient.

[0057] According to some embodiments of the invention, the sequence variation is in a non-coding sequence of the Grin2B gene.

[0058] According to some embodiments of the invention, the sequence variation is determined using DNA sequencing.

[0059] According to some embodiments of the invention, the amount of expression is determined using an RNA and/or a protein detection method.

[0060] According to some embodiments of the invention, the detection method is selected from the group consisting of PCR, oligonucleotide microarray, immunoprecipitation, Western blot analysis and FACS.

[0061] According to some embodiments of the invention, the level of expression is determined by hybridizing the biological sample or fractions or extracts thereof of the patient with an oligonucleotide which specifically hybridizes with a polynucleotide expressed from the Grin2B gene and/or by contacting the biological sample or fractions or extracts thereof of the patient with an antibody which specifically binds a polypeptide expressed from the Grin2B gene.

[0062] According to some embodiments of the invention, patient is diagnosed with GD.

[0063] According to an aspect of some embodiments of the present invention there is provided a composition of matter comprising a polynucleotide sample of a patient diagnosed with Gaucher Disease (GD); and an oligonucleotide capable of specifically hybridizing with a polynucleotide expressed from a Grin2B gene and optionally wherein the oligonucleotide is labeled.

[0064] According to an aspect of some embodiments of the present invention there is provided a composition of matter comprising a polypeptide sample of a patient diagnosed with Gaucher Disease (GD); and an antibody capable of specifically binding a polypeptide expressed from a Grin2B gene and optionally a secondary antibody.

[0065] According to some embodiments of the invention, there is provided a method of treating a patient diagnosed with neuropathic form of Gaucher Disease (GD), the method comprising:

[0066] (a) diagnosing the patient according to the method; and wherein presence of the sequence variation and/or an amount of the expression product above a predetermined level and/or increased amount expression product relative to a biological sample of a healthy patient or a patient diagnosed with GD type I is indicated,

[0067] (b) treating the patient with a NMDA receptor antagonist, thereby treating the patient diagnosed with neuropathic form of GD.

[0068] Further embodiments and the full scope of applicability of the present invention will become apparent from the detailed description given hereinafter. However, it should be understood that the detailed description and specific examples, while indicating preferred embodiments of the invention, are given by way of illustration only, since various changes and modifications within the spirit and scope of the invention will become apparent to those skilled in the art from this detailed description.

### BRIEF DESCRIPTION OF THE SEVERAL VIEWS OF THE DRAWINGS

[0069] FIGS. 1A-C show that different mouse strains demonstrate different susceptibility to CBE treatment. FIG. 1A is a figure adapted from Kirby et al. Genetics. 2010 July; 185(3):1081-95 showing the phylogenetic tree of 94 mouse strains. The strains used in the instant application are highlighted in bold lines. FIG. 1B is a Kaplan-Meier survival curve illustrating the survival curves of 15 different CBE-treated mouse strains. Mice were treated daily with CBE (25 mg/kg) day starting at postnatal day (P) 8. FIG. 1C shows progression of motor coordination in representative mouse strains following PBS (control, black lines) or CBE (gray lines) administration, as assessed by the hanging wire test. Data is presented as mean±SEM (n=4-5), *P<0.05.

[0070] FIG. 2 is a pictogram illustrating that CBE-induced brain pathology is strain specific. AKR/J and BTBR T^{+Itpr3tf/J} mice were treated with CBE. Mice were sacrificed at P22 and P208, respectively, and the presence of CD68-positive cells in cortical layer V of the brain was analyzed. AKR/J mice developed a more rapid brain disease whereas BTBR T^{+Itpr3tf/J} mice are resistant.

[0071] FIGS. 3A-F shows cerebral GBA1 activity and lipidomic analysis. FIG. 3A is a bar graph demonstrating GBA1 activity in brains of PBS- (control, black bars) or CBE-treated (gray bars) mice harvested on P18. Data is presented as mean±SEM (n=2 by duplicates). FIG. 3B is a graph showing lack of correlation between GBA1 activity following CBE-treatment and mouse life span. FIGS. 3C-F are bar graphs demonstrating GlcCer levels (FIG. 3C), GlcSo levels (FIG. 3D), GalCer levels (FIG. 3E), and GalSo levels (FIG. 3F) in brains of PBS- (control, black bars) and CBE-treated (gray bars) strains evaluated on P18. Each panel has an insertion graph showing the lack of correlation between each lipid and mouse life span following CBE treatment. Data is presented as mean±SEM (n=2).

[0072] FIG. 4A is a Manhattan plot generated using EMMA for SNPs identified in 15 different mouse strains. FIG. 4B is a blow-out of the Manhattan plot of FIG. 3A, focusing on positions 130,000,000 to 140,000,000 on chromosome 6.

[0073] FIG. 5A show cortical mRNA levels of Grin2b as evaluated by qPCR in cortical homogenates derived from PBS- or CBE-treated mice on P18. The genotypes of the SNPs in rs29869040 which reside within the Grin2b gene are indicated. A/J and C57BL/6/JolaHsd (denoted as C57) represent the short living strains while NZW and FVB represent the long living strains. Results are expressed as mean±SEM (n=3). Cycle threshold (Ct) values were normalized to the levels of TATA box-binding protein (Tbp). *P<0.05 between the short and long lived strains, #P<0.05 between PBS and CBE-treated tissues.

[0074] FIG. 5B shows NR2B protein levels as evaluated by western blot analysis of frontal, occipital, parietal cortex and cerebellum of control, Type 1 GD, and Type 2 GD patients. GAPDH levels were used as loading controls.

[0075] FIG. 6 is a line graph illustrating how blocking NMDA receptor extends C3H mice survival. Male mice from the C3H/HeJ (C3H) strain were treated daily with CBE (25 mg/Kg day) (black line) or CBE (25 mg/Kg day) plus MK-801 (0.3 mg/Kg day) (gray line) starting at P8.

[0076] FIG. 7 show line graphs illustrating how activating NMDA receptor reduces mice survival. Male mice from BALB/cJ, FVB/NJ, 129S1/SvImJ, and BTBR T⁺ Itpr3^{tf/J} strains were treated daily with CBE (25 mg/kg day) (black lines) or CBE (25 mg/kg day) plus D-cycloserine (200 mg/kg day) (gray lines) starting at P8.

[0077] FIGS. 8A-C show line graphs illustrating how memantine, an NMDA receptor antagonist, extends the lifespan of neuropathic GD mice. FIG. 8A shows Kaplan-Meier survival curves of male mice from A/J (AJ), C3H/HeJ (C3H), DBA/2J (DBA), and C57BL6/JolaHsd (C57) strains treated daily with CBE (25 mg/kg day) (CBE, black lines) or CBE (25 mg/kg) plus memantine (3 mg/kg day) (CBE-M, gray lines) starting at P8. FIGS. 8B-C show Kaplan-Meier survival curves (FIG. 8B) and mean survival times (FIG. 8C) of A/J mice treated daily with CBE (50 mg/kg day) (n=5) or CBE (50 mg/kg day) plus memantine 3 mg/kg (denoted as 1X, n=3) or CBE plus memantine 30 mg/kg day (denoted as X10, n=4) starting at P8. Results in FIG. 8C are presented as mean±SEM. *P<0.05.

[0078] FIG. 9A shows progression of motor coordination in A/J PBS-treated mice (black continuous line) (n=5), A/J CBE-treated mice (gray dot) (n=4) and A/J CBE-memantine (dotted line) (n=5), as assessed by the hanging wire test. Results are mean±SEM. *P<0.05 compared to PBS controls.

[0079] FIG. 9B is a bar graph showing cerebral GBA1 activity following treatment with PBS, CBE or CBE plus memantine in A/J mouse brains harvested at P18 or P70. Data is presented as mean±SEM, n=2 biological replicates and 2 technical replicates *P<0.001.

[0080] FIGS. 10A-B show Kaplan-Meier survival curves (FIG. 10B) and mean survival times (FIG. 10B) of Gba^{flox/flox}; nestin-Cre mice treated daily with PBS (control, n=9), memantine 3 mg/kg (denoted as 1X, n=4) or memantine 30 mg/kg day (denoted as 10X, n=6) starting at P8. Results in FIG. 10B are presented as mean±SEM. *P<0.05.

[0081] FIG. 11 shows Kaplan-Meier survival curves of A/J mice treated daily with CBE (25 mg/kg day, black lines) or CBE (25 mg/kg day) plus Ifenprodil (gray line) starting at P8.

### DETAILED DESCRIPTION OF THE INVENTION

[0082] The invention is directed to means and methods for treating a subject diagnosed to be at risk of developing or afflicted with neuropathic forms of Gaucher Disease (GD). The method of the invention comprises administering to the subject a therapeutically effective amount of an NMDA receptor antagonist effective in inhibiting or blocking the activity of NMDA receptors. The invention is applicable to all neuropathic forms of GD, including Type 2, Type 3a and Type 3b.

[0083] The treatments available to date for lysosomal storage diseases resulting from an enzyme deficiency, including Type 1 GD, are highly expensive and not always effective. As for Type 2 and Type 3 GD, no efficient therapeutic approach for treating those conditions exists. Very little is known about the biochemical pathways that lead to pathological events inneuropathic (also known as neuronopathic) GD (nGD).

[0084] Clinically, GD is very heterogeneous and patients bearing identical mutations in the lysosomal glucocerebrosidase (GBA1) gene can present completely different manifestations, indicating the existence of modifier genes. The inventors of the present invention herein show, for the first time, that the Grin2b gene, encoding for the subunit B of the NMDA glutamate receptor, is associated with GD progression in mice afflicted with GD. In addition, the present invention now shows that mice demonstrating GD present extended life span when treated by NMDA receptor antagonists. Therefore, according to this invention sequence variations and mRNA and/or protein levels of NMDA can be used in nGD diagnosis; and compounds capable of inhibiting the activity of NMDA receptors are suitable for the treatment of nGD.

[0085] As is illustrated hereinunder and in the Examples section, which follows, the present inventors show that different mouse strains respond differently to GD induction by CBE, a response which is correlated to their genetic background. Furthermore, mouse strains that present short life span also present brain pathology and motor dysfunction and thus can be used as a mouse model for neuropathic Gaucher Disease (nGD) (Example 1, FIGS. 1A-C and 2 and Table 2). Importantly, there is no correlation between the survival rates of the mice and brain GBA1 activity nor GlcCer, GlcSo, GalCer and GalSo lipid levels (Example 2, FIGS. 3A-F), indicating the involvement of modifier genes in the nGD pathology. GWAS analysis has identified Grin2b, the gene encoding for the subunit B of the NMDA glutamate receptor, as a potential modifier gene of nGD progression (Example 4 FIGS. 4A-B and 5A-B). Specifically, the inventors have uncovered a single nucleotide variation (SNP ID rs29869040) in a non-coding sequence of the Grin2b gene which correlates to nGD.

[0086] The present inventors further demonstrate that agonists of NMDA receptor (e.g. D-cycloserine) reduce survival of GD mice and antagonists of the NMDA receptor (e.g. MK801, Memantine and Ifenprodil) increase life expectancy and delay the progression of motor dysfunction in nGD mice while not affecting brain GBA1 inhibition (Examples 4-5, FIGS. 6-7, 8A-C, 9A-B, 10A-B and 11).

[0087] Consequently, the present teachings provide compositions comprising an NMDA receptor antagonist for use in treating neuropathic forms of Gaucher Disease (nGD) and methods of diagnosing nGD. Inspired by these surprising findings, the present invention provides, in one aspect, a pharmaceutical composition comprising at least one NMDA receptor antagonist or a pharmaceutically acceptable salt, hydrate or pharmaceutically active enantiomer thereof, for use in treating a neuropathic form of GD.

[0088] According to another aspect of the present invention, there is provided an NMDA receptor antagonist for use in treating a neuropathic form of GD.

[0089] Without wishing to be bound by any theory or mechanism of action, the NMDA receptor antagonist has neuro-protective activity. The term “neuro-protective activity” as used herein refers to the effects of reducing or ameliorating nervous insult, and protecting or reviving neuronal cells that have suffered nervous insult. As used herein, the term “nervous insult” refers to any damage to neuronal cell or tissue resulting from various causes such as metabolic, toxic, neurotoxic and chemical causes.

[0090] The present invention further provides, in another aspect, a method for treating a neuropathic form of GD in a patient in need thereof, comprising the step of administering a pharmaceutical composition comprising at least one NMDA receptor antagonist or a pharmaceutically acceptable salt, hydrate or pharmaceutically active enantiomer thereof to the patient, thereby treating the neuropathic form of GD.

[0091] According to another aspect of the present invention, there is provided a method for treating a neuropathic form of GD in a patient in need thereof, comprising administering a therapeutically effective amount of an NMDA receptor antagonist to the patient, thereby treating the neuropathic form of GD.

[0092] The present invention also provides, in an aspect, the use of at least one NMDA receptor antagonist or a pharmaceutically acceptable salt, hydrate or pharmaceutically active enantiomer thereof in the manufacture of a medicament for treating a neuropathic form of GD.

[0093] According to another aspect of the present invention, there is provided a use of at least one NMDA receptor antagonist in the manufacture of a medicament for treating a neuropathic form of GD.

[0094] The present invention further provides, in another aspect, a kit comprising at least one container comprising a pharmaceutical composition, the pharmaceutical composition comprising at least one NMDA receptor antagonist or a pharmaceutically acceptable salt, hydrate or pharmaceutically active enantiomer thereof, for use in treating neuropathic forms of GD.

[0095] The terms “treating” and “treatment” as used herein refer to abrogating, substantially inhibiting, slowing or reversing the progression of a condition, substantially delaying the appearance of clinical symptoms of a condition, substantially ameliorating clinical symptoms of a condition or substantially preventing the appearance of clinical symptoms of a condition. The term “treating” as used herein further refers to extending survival or delaying death of patients inflicted with a condition.

[0096] As used herein the phrases “patient in need thereof” and “subject in need thereof” which are interchangeably used herein, refer to a mammalian male or female subject (e.g., human being) who is diagnosed with the condition (i.e. neuropathic GD). In a specific embodiment, this term encompasses individuals who are at risk to develop the condition. The patient may be of any gender or at any age including neonatal, infant, juvenile, adolescent, adult and elderly adult. For diagnostic purposes according to some embodiments of the invention, the subject is further defined hereinbelow.

[0097] The terms “Gaucher's disease (GD)” or “Gaucher disease” as used herein, refers to a lysosomal storage disease (LSD) characterized by accumulation of glucosylceramide (GlcCer, also known as glucocerebroside) in cells, particularly in cells of the mononuclear cell lineage. Glucosylceramide can collect in the spleen, liver, kidneys, lungs, brain and bone marrow The disease is caused by a deficiency of the enzyme glucocerebrosidase (also known as beta-glucosidase, D-glucosyl-N-acylsphingosine glucohydrolase, GCD or GCase; EC 3.2.1.45), a lysosomal enzyme with glucosylceramidase activity that is needed to cleave, by hydrolysis, the beta-glucosidic linkage of glucosylceramide.

[0098] GD is divided into two major types: neuropathic and non-neuropathic disease, based on the particular symptoms of the disease. In non-neuropathic disease most organs and tissues can be involved, but not the brain. In neuropathic disease (nGD) the brain is also involved.

[0099] Type I (or non-neuropathic type, GD1) is the most common form of the disease, occurring in approximately 1 in 50,000 live births. It occurs most often among persons of Ashkenazi Jewish heritage. Symptoms may begin early in life or in adulthood and include enlarged liver and grossly enlarged spleen (known together as ‘hepatosplenomegaly’); the spleen can rupture and cause additional complications. Spleen enlargement and bone marrow replacement cause anemia, thrombocytopenia and leukopenia. Skeletal weakness and bone disease may be extensive. The brain is not affected pathologically, but there may be lung and, rarely, kidney impairment. Patients in this group usually bruise easily (due to low levels of platelets) and experience fatigue due to low numbers of red blood cells. Depending on disease onset and severity, type 1 patients may live well into adulthood. Some patients have a mild form of the disease or may not show any symptoms.

[0100] Neuropathic GD (nGD) as used herein encompasses both Type 2 and Type 3 GD.

[0101] GD type 2, also referred to as acute infantile neuropathic GD, typically begins within 6 months of birth and has an incidence rate around one 1 in 100,000 live births. Symptoms include an enlarged liver and spleen, extensive and progressive brain damage, eye movement disorders, spasticity, seizures, limb rigidity, and a poor ability to suck and swallow. Affected children usually die by age two.

[0102] According to specific embodiments, the neuropathic GD is GD Type 2.

[0103] GD type 3, also referred to as chronic neuropathic GD, can begin at any time in childhood or even in adulthood, and occurs in about one in 100,000 live births. It is characterized by slowly progressive, but milder neurologic symptoms compared to the acute or type 2 version. GD Type 3 has been divided into two variants, termed Types 3b and 3a. Type 3b has earlier onset of massive livers and spleens and the patients can also experience direct involvement of the lungs and rapidly progressive bony disease. Major symptoms include an enlarged spleen and/or liver, seizures, poor coordination, skeletal irregularities, eye movement disorders, blood disorders including anemia, and respiratory problems. Patients often live into their early teen years and adulthood.

[0104] According to specific embodiments, the neuropathic GD is the sub-acute, chronic neuropathic GD Type 3. In certain embodiments, the GD Type 3 is GD Type 3a. In certain embodiments, the GD Type 3 is GD Type 3b.

[0105] In certain embodiments, the NMDA receptor antagonist or the pharmaceutical composition comprising same is for use in treating at least one symptom related to the neuropathic forms of GD. In certain embodiments, the symptom is selected from the group consisting of convulsions, hypertonia, mental retardation, apnea, extensive and progressive brain damage, eye movement disorders, spasticity, seizures, limb rigidity, poor ability to suck and swallow, poor coordination, skeletal irregularities, blood disorders, anemia, muscle twitches (myoclonus), convulsions, dementia, ocular muscle apraxia, respiratory problems and any combination thereof. Each possibility represents a different embodiment of the invention.

[0106] As used herein, the term “NMDA receptor”, also known as N-methyl-D-aspartate receptor, refers to a glutamate receptor and ion channel protein which is a hetero-tetramer molecule that has at least one NR1 subunit (also known as GluN1) and at least one NR2 subunit (also known as GluN2). NMDA receptors can be divided into 2 groups, according to their distribution in neurons: synaptic and extra-synaptic. Typically, the synaptic receptors promote survival signaling cascades while the extra-synaptic mediate the toxic effects of excitotoxicity. According to specific embodiments, the NMDA receptor is an extra-synaptic NMDA receptor.

[0107] Multiple receptor isoforms with distinct brain distributions and functional properties arise by selective splicing of the NR1 transcripts and differential expression of the NR2 subunits. While a single NR2 subunit is found in invertebrate organisms, four distinct isoforms of the NR2 subunit are expressed in vertebrates and are referred to with the nomenclature NR2A through D (coded by genes GRIN2A, GRIN2B, GRIN2C and GRIN2D, respectively).

[0108] As detailed in the examples section below, it was found that Grin2b, the gene encoding for the subunit B of the NMDA glutamate receptor (NR2B), is a potential modifier gene of GD progression. Thus, in certain embodiments, the NMDA receptor, either synaptic or extra-synaptic, comprises a NR2B subunit. In particular embodiments, the extra-synaptic NMDA receptor comprises a NR2B subunit.

[0109] As used herein, the term “NR2B”, also known as NMDAR2B; Glutamate [NMDA] receptor subunit epsilon-2; glutamate receptor subunit epsilon-2; glutamate receptor, ionotropic, N-methyl D-aspartate 2B; GRIN2B; hNR3; MGC142178; MGC142180; N-methyl D-aspartate receptor subtype 2B; N-methyl-D-aspartate receptor subunit 3; NMDE2; or NR3, refers to refers to an expression product of the Grin2B gene. According to specific embodiments, the Grin2B gene refers to the human gene such as provided in the following Gene ID Number: 2904 (SEQ ID NO: 6). According to other specific embodiments the Grin2B gene refers to the mouse gene such as provided in the following Gene ID Number: 14812 (SEQ ID NO: 7). According to a specific embodiment, the NR2B protein refers to the human protein, such as provided in the following GenBank Number NP_000825 (SEQ ID NO: 8). According to a specific embodiment, the NR2B protein refers to the mouse protein, such as provided in the following GenBank Number NP_032197 (SEQ ID NO: 9).

[0110] The term “NMDA receptor antagonist” as used herein refers to a molecule that prevents and/or inhibits the biological function and/or expression of an N-methyl-D-aspartate receptor (NMDAR).

[0111] The antagonist may be a reversible or an irreversible antagonist.

[0112] The antagonist may be a competitive or a non-competitive antagonist.

[0113] According to specific embodiments the antagonist is a non-competitive antagonist.

[0114] According to other specific embodiments, the antagonist inhibits the biological function (e.g. ligand binding, opening of an ion channel) of the receptor e.g., as detected by e.g. electrophysiological recordings, calcium dyes, or calcium signaling. The reduction may be by at least a 10%, at least 20%, at least 30%, at least 40%, at least 50%, at least 60%, at least 70%, at least 80%, at least 90%, at least 95% or at least 99% as compared to same in the absence of the antagonist. According to specific embodiments, the antagonist completely prevents the biological function (e.g. ligand binding, opening of the ion channel) of the receptor.

[0115] According to specific embodiments, the antagonist directly binds the receptor, thereby preventing and/or inhibiting the activity and/or expression of the receptor. Binding assays are well known in the art and include e.g. BiaCore, high-performance liquid chromatography (HPLC) or flow cytometry.

[0116] According to other specific embodiments, the antagonist indirectly binds the NMDA receptor by acting through an intermediary molecule, for example the antagonist binds to or modulates a molecule that in turn binds to or modulates the NMDA receptor.

[0117] As described above, it is known that NMDA receptors can be divided into 2 groups, synaptic receptors, which promote survival signaling cascades; and extra-synaptic receptors, which mediate the toxic effects of excitotoxicity (Parsons and Raymond, 2014). It is thus speculated, without being limited to any theory or mechanism, that neuro-protection may be achieved by specifically targeting the excitotoxicity-promoting extra-synaptic receptors. Thus, in certain embodiments, the NMDA receptor antagonist preferentially binds to extra-synaptic NMDA receptors.

[0118] Thus, according to specific embodiments, the NMDA receptor antagonist prevents and/or inhibits excessive calcium influx via the NMDA receptor.

[0119] Certain NMDA receptor antagonists, such as MK-801, cannot be used to treat human patients due to their related toxicity, blocking not just the toxic effects of excessive calcium influx via extra-synaptic receptors, but also crucial normal functions of glutamate signaling.

[0120] Thus, according to specific embodiments, the NMDA receptor antagonist does not interfere with glutamate signaling via the NMDA receptor.

[0121] Furthermore, the use of NMDA receptor antagonists devoid of unacceptable side-effects such as hallucinogenic effects is warranted. Therefore, other NMDA receptor antagonists, such as memantine, which preferentially block extra-synaptic NMDA receptors, are favored, due to their specificity and safety.

[0122] The term “preferentially binds extra-synaptic NMDA receptors” as used herein refers to any NMDA receptor antagonist which binds extra-synaptic NMDA receptors without interfering with normal functions of glutamate signaling.

[0123] In certain embodiments, the NMDA receptor antagonist preferentially binds to a subset of NR2 subunits. In certain embodiments, the NMDA receptor antagonist preferentially binds to NR2B subunits. In certain embodiments, the NMDA receptor antagonist binds specifically to NR2B subunits without cross reactivity with other NR2 subunits.

[0124] In certain embodiments, the NMDA receptor antagonist binds to an NMDA receptor of a neuronal cell having β-glucocerebrosidase activity deficiency relative to corresponding healthy neuronal cells. The phrase “neuronal cell having β-glucocerebrosidase activity deficiency” as used herein further refers to a neuronal cell having significantly lower β-glucocerebrosidase activity than the β-glucocerebrosidase activity in normal, healthy neuronal cells.

[0125] Preventing and/or inhibiting the biological function of an NMDA receptor can be effected at the protein level but may also be effected at the genomic and/or the transcript level using a variety of molecules which interfere with transcription and/or translation of a receptor.

[0126] Therefore, non-limiting examples of antagonists that can be used according to some embodiments of the invention include small molecules, antibodies, inhibitory peptides, enzymes that cleave the polypeptide, aptamers homologous recombination agents, site specific endonucleases and RNA silencing agents.

[0127] Platform technologies for passing the blood brain barrier (BBB) are available and known in the art and include, but not limited to, directed liposomes, nanoparticles, microbubbles, phages by nasal administration, exosomes, pro-drugs and peptide-masking. Other exemplary approaches for drug delivery to the central nervous system (CNS) are further described hereinbelow.

[0128] Non limiting examples of agents that can function as antagonists are described in details hereinbelow.

[0129] Suppressing Biological Function at the Polypeptide Level

[0130] According to specific embodiments, the antagonistic agent is a molecule which interferes with the receptor function (e.g. catalytic or interaction) by binding to and/or cleaving the receptor. Such molecules can be, but are not limited to, small molecules, inhibitory peptides, enzymes that cleaves the receptor, adnectins, affibodies, avimers, anticalins, tetranectins, DARPins, and engineered Kunitz-type inhibitors wherein each possibility is a separate embodiment of the invention.

[0131] According to a specific embodiment, the antagonist is a small molecule.

[0132] According to a specific embodiment, the antagonist is a peptide molecule.

[0133] It will be appreciated that a non-functional analogue of at least a catalytic or binding portion of an inhibitory peptide can be also used as an antagonist.

[0134] Many compounds acting as NMDA receptor antagonists are known in the field, therefore the specific NMDA receptor antagonists specified below are by no means limiting to the scope of the invention.

[0135] Table 1 provides a list of several known NMDA receptor antagonists.

TABLE 1

| Additional | | NMDA receptor |
|---|---|---|
| activity | Formula | antagonist |
| stimulates | 3,5-Dimethyl-1-adamantanamine hydrochloride | Memantine |
| dopamine | | |
| release | | |
| selectively | 3-amino-5,7-diethyladamantan-1-yl nitrate | Nitromemantine |
| inhibits | | |
| extrasynaptic | | |
| over | | |
| physiological | | |
| synaptic | | |
| NMDA | | |
| receptor | | |
| activity | | |
| nAChR | 1,3,3,5,5-pentamethylcyclohexanamine | Neramexane |
| antagonist | | |
| D₂ receptor | (RS)-2-(2-Chlorophenyl)-2- | Ketamine |
| partial | (methylamino)cyclohexanone | |
| agonist | | |
| nAChR | adamantan-1-amine | Amantadine |
| antagonist | | |
| sigma-1 | (4bS,8aR,9S)-3-Methoxy-11-methyl-6,7,8,8a,9,10- | Dextromethorphan |
| receptor | hexahydro-5H-9,4b-(epiminoethano)phenanthrene | |
| agonist; | | |
| nAChR | | |
| antagonist | | |
| sigma-1 | 1′-benzylspiro[2,3-dihydro-1H-naphthalene-4,4′- | L-687,384 |
| receptor | piperidine] | |
| agonist | | |
| sigma-1 | 3-(10,11-dihydro-5H-dibenzo[a,d]cycloheptene-5- | Amitriptyline |
| receptor | ylidene)-N,N-dimethylpropan-1-amine | |
| agonist | | |
| sigma-1 | 1-benzyl-6′-methoxy-6′,7′-dihydrospiro[piperidine-4,4′- | |
| receptor | thieno[3.2-c]pyran] | |
| agonist | | |
| α-adrenergic | α-(4-Hydroxyphenyl)-β-methyl-4-benzyl-1- | Ifenprodil |
| central and | piperidineethanol (+)-tartrate salt | |
| peripheral | | |
| vasodilator; | | |
| α2 | | |
| adrenergic | | |
| receptor | | |
| ligand | | |
| Muscarinic | β-Dimethylaminoethyl 2-methylbenzhydryl ether citrate | Orphenadrine |
| receptor | salt | |
| antagonist; | | |
| H₁ histamine | | |
| receptor | | |
| antagonist; | | |
| reported to | | |
| inhibit the | | |
| noradrenergic | | |
| transporter | | |
| blocks | 4-Hydroxyquinoline-2-carboxylic acid | Kynurenic acid |
| nicotinic | | |
| acetycholine | | |
| receptors | | |
| has γ- | 2-Phenyl-1,3-propanediol dicarbamate | Felbamate |
| aminobutyric | | |
| acid | | |
| (GABA_{A}) | | |
| receptor | | |
| agonist | | |
| properties | | |
| | D(−)-2-Amino-5-phosphonopentanoic acid | D(−)-AP-5 |
| | (±)-3-(2-Carboxypiperazin-4-yl)propyl-1-phosphonic acid | (±)-CPP |
| | P-[2-(8,9-dioxo-2,6-diazabicyclo[5.2.0]non-1(7)-en-2- | EAA-090 |
| | yl)ethyl]-phosphonic acid | |
| | 3-Chloro-4-fluoro-N-[(4-{[2- | TCN-201 |
| | (phenylcarbonyl)hydrazino]carbonyl}phenyl)methyl]benzenesulfonamide | |
| | DL-2-Amino-5-phosphonovaleric acid | AP-5 |
| | (αS)-α-Phenyl-2-pyridineethanamine dihydrochloride | AZD6765 |
| | (S)-α-Amino-2-chloro-5-(phosphonomethyl)[1,1?- | SDZ 220-581 |
| | biphenyl]-3-propanoic acid hydrochloride | |
| | (±)-2-Amino-2-(2-chlorophenyl)cyclohexanone | (±)-Norketamine |
| | hydrochloride | |
| | α-(4-Chlorophenyl)-4-[(4-fluorophenyl)methyl]-1- | Eliprodil |
| | piperidineethanol | |
| | (+)-3-Hydroxy-N-methylmorphinan (+)-tartrate salt | Dextrorphan |
| | 5,7-Dichloro-4-hydroxyquinoline-2-carboxylic acid | 5,7- |
| | monohydrate | Dichlorokynurenic |
| | | acid |
| | | monohydrate |
| | Gly-Glu-Glu-Glu-Leu-Gln-Glu-Asn-Gln-Glu-Leu-Ile-Arg- | [Glu3,4,7,10,14]- |
| | Glu-Lys-Ser-Asn (SEQ ID NO: 1) | Conantokin G |
| | D(−)-2-Amino-7-phosphonoheptanoic acid | D-AP-7 |
| | 1-N-Methylamino-3,5-dimethyladamantane hydrochloride | MD-Ada |
| | DL-2-Amino-7-phosphonoheptanoic acid | AP-7 |
| | 4-{3-[4-(4-fluorophenyl)-3,6-dihydro-2H-pyridin-1-yl]-2- | Ro 8-4304 |
| | hydroxy-propoxy}-benzamide | |
| | N,N′-Bis(3-aminopropyl)-1,4-diaminobutane | Spermine |
| | [R-(R*,S*)]-α-(4-Hydroxyphenyl)-β-methyl-4- | Ro 25-6981 |
| | (phenylmethyl)-1-piperidinepropanol hydrochloride | |
| | hydrate | |
| | 6,7-Dichloro-2,3-quinoxalinedione | DCQX |
| | (1S,2S)-1-(4-hydroxy-phenyl)-2-(4-hydroxy-4- | Traxoprodil |
| | phenylpiperidino)-1-propanol | |
| | (E)-4,6-Dichloro-3-(2-phenyl-2-carboxyethenyl)indole-2- | MDL 105,519 |
| | carboxylic acid | |
| | [[3,4-Dihydro-7-(4-morpholinyl)-2,3-dioxo-6- | Fanapanel |
| | (trifluoromethyl)-1(2H)-quinoxalinyl]methyl]-phosphonic | |
| | acid hydrate | |
| | 1-[1-(3-Isothiocyanato)phenyl]cyclohexylpiperidine | Metaphit |
| | methanesulfonate salt | |
| | 1-Piperidinepropanol | Ro 25-6981 |
| | N-Acetylaspartylglutamic acid | NAAG |
| | 5-Fluoroindole-2-carboxylic acid | |
| | (S)-(−)-4-Oxo-2-azetidinecarboxylic acid | |
| | Benzyl (S)-(−)-4-oxo-2-azetidinecarboxylate | |
| | (±)-α-Amino-3-carbomethoxy-5-methylisoxazole-4- | |
| | propanoic acid | |

[0136] In certain embodiments, the at least one NMDA receptor antagonist is selected from the group consisting of memantine, nitromemantine, neramexane, ketamine, amantadine, dextromethorphan, L-687,384, amitriptyline, 1-benzyl-6′-methoxy-6′,7′-dihydrospiro[piperidine-4,4′-thieno[3.2-c]pyran], ifenprodil, orphenadrine, kynurenic acid, felbamate, D(−)-AP-5, (±)-CPP, EAA-090, TCN-201, AP-5, AZD6765, SDZ 220-581, (±)-norketamine, eliprodil, dextrorphan, 5,7-dichlorokynurenic acid monohydrate, [Glu3,4,7,10,14]-Conantokin G, D-AP-7, MD-Ada, AP-7, Ro 8-4304, spermine, Ro 25-6981, DCQX, traxoprodil, MDL 105,519, fanapanel, metaphit, Ro 25-6981, NAAG, 5-fluoroindole-2-carboxylic acid, (S)-(−)-4-oxo-2-azetidinecarboxylic acid, benzyl (S)-(−)-4-oxo-2-azetidinecarboxylate and (±)-α-Amino-3-carbomethoxy-5-methylisoxazole-4-propanoic acid, and pharmaceutically acceptable salts, hydrates and pharmaceutically active enantiomers thereof. Each possibility represents a separate embodiment of the invention.

[0137] In certain embodiments, at least one NMDA receptor antagonist is selected from the group consisting of memantine, nitromemantine, neramexane, ketamine, amantadine, dextromethorphan, L-687,384, amitriptyline, 1-benzyl-6′-methoxy-6′,7′-dihydrospiro[piperidine-4,4′-thieno[3.2-c]pyran], ifenprodil, eliprodil, orphenadrine, kynurenic acid, felbamate, and pharmaceutically acceptable salts, hydrates and pharmaceutically active enantiomers thereof. Each possibility represents a separate embodiment of the invention.

[0138] In certain embodiments, at least one NMDA receptor antagonist is selected from the group consisting of memantine, nitromemantine, neramexane, and pharmaceutically acceptable salts, hydrates and pharmaceutically active enantiomers thereof. Each possibility represents a separate embodiment of the invention.

[0139] According to specific embodiments, the NMDA receptor antagonist is selected from the group consisting of memantine, eliprodil and ifenprodil or a pharmaceutically acceptable salt, hydrate or pharmaceutically active enantiomer thereof.

[0140] In certain embodiments, the NMDA receptor antagonist is memantine (3,5-dimethyl-1-adamantanamine hydrochloride) or a pharmaceutically acceptable salt, hydrate or pharmaceutically active enantiomer thereof. Each possibility represents a separate embodiment of the invention.

[0141] According to specific embodiments, the antagonistic agent is an antibody. According to specific embodiments, the antagonistic antibody specifically binds at least one epitope of an NMDA receptor. According to specific embodiments, the antibody can cross the BBB.

[0142] As used herein, the term “epitope” refers to any antigenic determinant on an antigen to which the paratope of an antibody binds. Epitopic determinants usually consist of chemically active surface groupings of molecules such as amino acids or carbohydrate side chains and usually have specific three dimensional structural characteristics, as well as specific charge characteristics.

[0143] The term “antibody” as used in this invention includes intact molecules as well as functional fragments thereof, such as Fab, F(ab′)2, Fv, scFv, dsFv, or single domain molecules such as VH and VL that are capable of binding to an epitope of an antigen. The antibody may be mono-specific (capable of recognizing one epitope or protein), bi-specific (capable of binding two epitopes or proteins) or multi-specific (capable of recognizing multiple epitopes or proteins).

[0144] Suitable antibody fragments for practicing some embodiments of the invention include a complementarity-determining region (CDR) of an immunoglobulin light chain (referred to herein as “light chain”), a complementarity-determining region of an immunoglobulin heavy chain (referred to herein as “heavy chain”), a variable region of a light chain, a variable region of a heavy chain, a light chain, a heavy chain, an Fd fragment, and antibody fragments comprising essentially whole variable regions of both light and heavy chains such as an Fv, a single chain Fv Fv (scFv), a disulfide-stabilized Fv (dsFv), an Fab, an Fab′, and an F(ab′)2.

[0145] As used herein, the terms “complementarity-determining region” or “CDR” are used interchangeably to refer to the antigen binding regions found within the variable region of the heavy and light chain polypeptides. Generally, antibodies comprise three CDRs in each of the VH (CDR HI or HI; CDR H2 or H2; and CDR H3 or H3) and three in each of the VL (CDR LI or LI; CDR L2 or L2; and CDR L3 or L3).

[0146] The identity of the amino acid residues in a particular antibody that make up a variable region or a CDR can be determined using methods well known in the art and include methods such as sequence variability as defined by Kabat et al. (See, e.g., Kabat et al., 1992, Sequences of Proteins of Immunological Interest, 5th ed., Public Health Service, NIH, Washington D.C.), location of the structural loop regions as defined by Chothia et al. (see, e.g., Chothia et al., Nature 342:877-883, 1989.), a compromise between Kabat and Chothia using Oxford Molecular's AbM antibody modeling software (now Accelrys®, see, Martin et al., 1989, Proc. Natl Acad Sci USA. 86:9268; and world wide web site www.bioinf-org.uk/abs), available complex crystal structures as defined by the contact definition (see MacCallum et al., J. Mol. Biol. 262:732-745, 1996), the “conformational definition” (see, e.g., Makabe et al., Journal of Biological Chemistry, 283:1156-1166, 2008) and IMGT [Lefranc M P, et al. (2003) IMGT unique numbering for immunoglobulin and T cell receptor variable domains and Ig superfamily V-like domains. Dev Comp Immunol 27: 55-77].

[0147] As used herein, the “variable regions” and “CDRs” may refer to variable regions and CDRs defined by any approach known in the art, including combinations of approaches.

[0148] Functional antibody fragments comprising whole or essentially whole variable regions of both light and heavy chains are defined as follows:

[0149] (i) Fv, defined as a genetically engineered fragment consisting of the variable region of the light chain (VL) and the variable region of the heavy chain (VH) expressed as two chains;

[0150] (ii) single chain Fv (“scFv”), a genetically engineered single chain molecule including the variable region of the light chain and the variable region of the heavy chain, linked by a suitable polypeptide linker as a genetically fused single chain molecule.

[0151] (iii) disulfide-stabilized Fv (“dsFv”), a genetically engineered antibody including the variable region of the light chain and the variable region of the heavy chain, linked by a genetically engineered disulfide bond.

[0152] (iv) Fab, a fragment of an antibody molecule containing a monovalent antigen-binding portion of an antibody molecule which can be obtained by treating whole antibody with the enzyme papain to yield the intact light chain and the Fd fragment of the heavy chain which consists of the variable and CH1 domains thereof;

[0153] (v) Fab′, a fragment of an antibody molecule containing a monovalent antigen-binding portion of an antibody molecule which can be obtained by treating whole antibody with the enzyme pepsin, followed by reduction (two Fab′ fragments are obtained per antibody molecule);

[0154] (vi) F(ab′)2, a fragment of an antibody molecule containing a monovalent antigen-binding portion of an antibody molecule which can be obtained by treating whole antibody with the enzyme pepsin (i.e., a dimer of Fab′ fragments held together by two disulfide bonds); and

[0155] (vii) Single domain antibodies or nanobodies are composed of a single VH or VL domains which exhibit sufficient affinity to the antigen.

[0156] The antibody may be monoclonal or polyclonal.

[0157] Methods of producing polyclonal and monoclonal antibodies as well as fragments thereof are well known in the art (See for example, Harlow and Lane, Antibodies: A Laboratory Manual, Cold Spring Harbor Laboratory, New York, 1988, incorporated herein by reference).

[0158] Antibody fragments according to some embodiments of the invention can be prepared by proteolytic hydrolysis of the antibody or by expression in E. coli or mammalian cells (e.g. Chinese hamster ovary cell culture or other protein expression systems) of DNA encoding the fragment. Antibody fragments can be obtained by pepsin or papain digestion of whole antibodies by conventional methods. For example, antibody fragments can be produced by enzymatic cleavage of antibodies with pepsin to provide a 5S fragment denoted F(ab′)2. This fragment can be further cleaved using a thiol reducing agent, and optionally a blocking group for the sulfhydryl groups resulting from cleavage of disulfide linkages, to produce 3.5S Fab′ monovalent fragments. Alternatively, an enzymatic cleavage using pepsin produces two monovalent Fab′ fragments and an Fc fragment directly. These methods are described, for example, by Goldenberg, U.S. Pat. Nos. 4,036,945 and 4,331,647, and references contained therein, which patents are hereby incorporated by reference in their entirety. See also Porter, R. R. [Biochem. J. 73: 119-126 (1959)]. Other methods of cleaving antibodies, such as separation of heavy chains to form monovalent light-heavy chain fragments, further cleavage of fragments, or other enzymatic, chemical, or genetic techniques may also be used, so long as the fragments bind to the antigen that is recognized by the intact antibody.

[0159] Fv fragments comprise an association of VH and VL chains. This association may be noncovalent, as described in Inbar et al. [Proc. Nat'l Acad. Sci. USA 69:2659-62 (19720]. Alternatively, the variable chains can be linked by an intermolecular disulfide bond or cross-linked by chemicals such as glutaraldehyde. Preferably, the Fv fragments comprise VH and VL chains connected by a peptide linker. These single-chain antigen binding proteins (sFv) are prepared by constructing a structural gene comprising DNA sequences encoding the VH and VL domains connected by an oligonucleotide. The structural gene is inserted into an expression vector, which is subsequently introduced into a host cell such as E. coli. The recombinant host cells synthesize a single polypeptide chain with a linker peptide bridging the two V domains. Methods for producing sFvs are described, for example, by [Whitlow and Filpula, Methods 2: 97-105 (1991); Bird et al., Science 242:423-426 (1988); Pack et al., Bio/Technology 11:1271-77 (1993); and U.S. Pat. No. 4,946,778, which is hereby incorporated by reference in its entirety.

[0160] Another form of an antibody fragment is a peptide coding for a single complementarity-determining region (CDR). CDR peptides (“minimal recognition units”) can be obtained by constructing genes encoding the CDR of an antibody of interest. Such genes are prepared, for example, by using the polymerase chain reaction to synthesize the variable region from RNA of antibody-producing cells. See, for example, Larrick and Fry [Methods, 2: 106-10 (1991)].

[0161] It will be appreciated that for human therapy or diagnostics, humanized antibodies are preferably used. Humanized forms of non-human (e.g., murine) antibodies are chimeric molecules of immunoglobulins, immunoglobulin chains or fragments thereof (such as Fv, Fab, Fab′, F(ab′).sub.2 or other antigen-binding subsequences of antibodies) which contain minimal sequence derived from non-human immunoglobulin. Humanized antibodies include human immunoglobulins (recipient antibody) in which residues form a complementary determining region (CDR) of the recipient are replaced by residues from a CDR of a non-human species (donor antibody) such as mouse, rat or rabbit having the desired specificity, affinity and capacity. In some instances, Fv framework residues of the human immunoglobulin are replaced by corresponding non-human residues. Humanized antibodies may also comprise residues which are found neither in the recipient antibody nor in the imported CDR or framework sequences. In general, the humanized antibody will comprise substantially all of at least one, and typically two, variable domains, in which all or substantially all of the CDR regions correspond to those of a non-human immunoglobulin and all or substantially all of the FR regions are those of a human immunoglobulin consensus sequence. The humanized antibody optimally also will comprise at least a portion of an immunoglobulin constant region (Fc), typically that of a human immunoglobulin [Jones et al., Nature, 321:522-525 (1986); Riechmann et al., Nature, 332:323-329 (1988); and Presta, Curr. Op. Struct. Biol., 2:593-596 (1992)].

[0162] Methods for humanizing non-human antibodies are well known in the art. Generally, a humanized antibody has one or more amino acid residues introduced into it from a source which is non-human. These non-human amino acid residues are often referred to as import residues, which are typically taken from an import variable domain. Humanization can be essentially performed following the method of Winter and co-workers [Jones et al., Nature, 321:522-525 (1986); Riechmann et al., Nature 332:323-327 (1988); Verhoeyen et al., Science, 239:1534-1536 (1988)], by substituting rodent CDRs or CDR sequences for the corresponding sequences of a human antibody. Accordingly, such humanized antibodies are chimeric antibodies (U.S. Pat. No. 4,816,567), wherein substantially less than an intact human variable domain has been substituted by the corresponding sequence from a non-human species. In practice, humanized antibodies are typically human antibodies in which some CDR residues and possibly some FR residues are substituted by residues from analogous sites in rodent antibodies.

[0163] Human antibodies can also be produced using various techniques known in the art, including phage display libraries [Hoogenboom and Winter, J. Mol. Biol., 227:381 (1991); Marks et al., J. Mol. Biol., 222:581 (1991)]. The techniques of Cole et al. and Boerner et al. are also available for the preparation of human monoclonal antibodies (Cole et al., Monoclonal Antibodies and Cancer Therapy, Alan R. Liss, p. 77 (1985) and Boerner et al., J. Immunol., 147(1):86-95 (1991)]. Similarly, human antibodies can be made by introduction of human immunoglobulin loci into transgenic animals, e.g., mice in which the endogenous immunoglobulin genes have been partially or completely inactivated. Upon challenge, human antibody production is observed, which closely resembles that seen in humans in all respects, including gene rearrangement, assembly, and antibody repertoire. This approach is described, for example, in U.S. Pat. Nos. 5,545,807; 5,545,806; 5,569,825; 5,625,126; 5,633,425; 5,661,016, and in the following scientific publications: Marks et al., Bio/Technology 10: 779-783 (1992); Lonberg et al., Nature 368: 856-859 (1994); Morrison, Nature 368 812-13 (1994); Fishwild et al., Nature Biotechnology 14, 845-51 (1996); Neuberger, Nature Biotechnology 14: 826 (1996); and Lonberg and Huszar, Intern. Rev. Immunol. 13, 65-93 (1995).

[0164] Once antibodies are obtained, they may be tested for activity, for example via ELISA.

[0165] Another agent which can be used as antagonist with some embodiments of the invention is an aptamer. As used herein, the term “aptamer” refers to double stranded or single stranded RNA molecule that binds to specific molecular target, such as a protein. Various methods are known in the art which can be used to design protein specific aptamers. The skilled artisan can employ SELEX (Systematic Evolution of Ligands by Exponential Enrichment) for efficient selection as described in Stoltenburg R, Reinemann C, and Strehlitz B (Biomolecular engineering (2007) 24(4):381-403).

[0166] Suppressing Biological Function at the Nucleic Acid Level

[0167] Down-regulation at the nucleic acid level is typically effected using a nucleic acid agent, having a nucleic acid backbone, DNA, RNA, mimetics thereof or a combination of same. The nucleic acid agent may be encoded from a DNA molecule or provided to the cell per se.

[0168] Thus, the antagonist of some embodiments of the invention can be an RNA silencing agent. As used herein, the phrase “RNA silencing” refers to a group of regulatory mechanisms [e.g. RNA interference (RNAi), transcriptional gene silencing (TGS), post-transcriptional gene silencing (PTGS), quelling, co-suppression, and translational repression] mediated by RNA molecules which result in the inhibition or “silencing” of the expression of a corresponding protein-coding gene. RNA silencing has been observed in many types of organisms, including plants, animals, and fungi.

[0169] As used herein, the term “RNA silencing agent” refers to an RNA which is capable of specifically inhibiting or “silencing” the expression of a target gene. In certain embodiments, the RNA silencing agent is capable of preventing complete processing (e.g, the full translation and/or expression) of an mRNA molecule through a post-transcriptional silencing mechanism. RNA silencing agents include non-coding RNA molecules, for example RNA duplexes comprising paired strands, as well as precursor RNAs from which such small non-coding RNAs can be generated. Exemplary RNA silencing agents include dsRNAs such as siRNAs, miRNAs and shRNAs.

[0170] In one embodiment, the RNA silencing agent is capable of inducing RNA interference.

[0171] In another embodiment, the RNA silencing agent is capable of mediating translational repression.

[0172] According to an embodiment of the invention, the RNA silencing agent is specific to the target RNA (e.g. Grin2b) and does not cross inhibit or silence other targets or a splice variant which exhibits 99% or less global homology to the target gene, e.g., less than 98%, 97%, 96%, 95%, 94%, 93%, 92%, 91%, 90%, 89%, 88%, 87%, 86%, 85%, 84%, 83%, 82%, 81% global homology to the target gene; as determined by PCR, Western blot, Immunohistochemistry and/or flow cytometry.

[0173] RNA interference refers to the process of sequence-specific post-transcriptional gene silencing in animals mediated by short interfering RNAs (siRNAs).

[0174] Following is a detailed description on RNA silencing agents that can be used according to specific embodiments of the present invention.

[0175] DsRNA, siRNA and shRNA—The presence of long dsRNAs in cells stimulates the activity of a ribonuclease III enzyme referred to as dicer. Dicer is involved in the processing of the dsRNA into short pieces of dsRNA known as short interfering RNAs (siRNAs). Short interfering RNAs derived from dicer activity are typically about 21 to about 23 nucleotides in length and comprise about 19 base pair duplexes. The RNAi response also features an endonuclease complex, commonly referred to as an RNA-induced silencing complex (RISC), which mediates cleavage of single-stranded RNA having sequence complementary to the antisense strand of the siRNA duplex. Cleavage of the target RNA takes place in the middle of the region complementary to the antisense strand of the siRNA duplex.

[0176] Accordingly, some embodiments of the invention contemplate use of dsRNA to downregulate protein expression from mRNA.

[0177] According to one embodiment dsRNA longer than 30 bp are used. Various studies demonstrate that long dsRNAs can be used to silence gene expression without inducing the stress response or causing significant off-target effects—see for example [Strat et al., Nucleic Acids Research, 2006, Vol. 34, No. 13 3803-3810; Bhargava A et al. Brain Res. Protoc. 2004; 13:115-125; Diallo M., et al., Oligonucleotides. 2003; 13:381-392; Paddison P. J., et al., Proc. Natl Acad. Sci. USA. 2002; 99:1443-1448; Tran N., et al., FEBS Lett. 2004; 573:127-134].

[0178] According to some embodiments of the invention, dsRNA is provided in cells where the interferon pathway is not activated, see for example Billy et al., PNAS 2001, Vol 98, pages 14428-14433. and Diallo et al, Oligonucleotides, Oct. 1, 2003, 13(5): 381-392. doi:10.1089/154545703322617069.

[0179] According to an embodiment of the invention, the long dsRNA are specifically designed not to induce the interferon and PKR pathways for down-regulating gene expression. For example, Shinagwa and Ishii [Genes & Dev. 17 (11): 1340-1345, 2003] have developed a vector, named pDECAP, to express long double-strand RNA from an RNA polymerase II (Pol II) promoter. Because the transcripts from pDECAP lack both the 5′-cap structure and the 3′-poly(A) tail that facilitate ds-RNA export to the cytoplasm, long ds-RNA from pDECAP does not induce the interferon response.

[0180] Another method of evading the interferon and PKR pathways in mammalian systems is by introduction of small inhibitory RNAs (siRNAs) either via transfection or endogenous expression.

[0181] The term “siRNA” refers to small inhibitory RNA duplexes (generally between 18-30 base pairs) that induce the RNA interference (RNAi) pathway. Typically, siRNAs are chemically synthesized as 21 mers with a central 19 bp duplex region and symmetric 2-base 3′-overhangs on the termini, although it has been recently described that chemically synthesized RNA duplexes of 25-30 base length can have as much as a 100-fold increase in potency compared with 21 mers at the same location. The observed increased potency obtained using longer RNAs in triggering RNAi is suggested to result from providing Dicer with a substrate (27 mer) instead of a product (21 mer) and that this improves the rate or efficiency of entry of the siRNA duplex into RISC.

[0182] It has been found that position of the 3′-overhang influences potency of an siRNA and asymmetric duplexes having a 3′-overhang on the antisense strand are generally more potent than those with the 3′-overhang on the sense strand (Rose et al., 2005). This can be attributed to asymmetrical strand loading into RISC, as the opposite efficacy patterns are observed when targeting the antisense transcript.

[0183] The strands of a double-stranded interfering RNA (e.g., an siRNA) may be connected to form a hairpin or stem-loop structure (e.g., an shRNA). Thus, as mentioned, the RNA silencing agent of some embodiments of the invention may also be a short hairpin RNA (shRNA).

[0184] The term “shRNA”, as used herein, refers to an RNA agent having a stem-loop structure, comprising a first and second region of complementary sequence, the degree of complementarity and orientation of the regions being sufficient such that base pairing occurs between the regions, the first and second regions being joined by a loop region, the loop resulting from a lack of base pairing between nucleotides (or nucleotide analogs) within the loop region. The number of nucleotides in the loop is a number between and including 3 to 23, or 5 to 15, or 7 to 13, or 4 to 9, or 9 to 11. Some of the nucleotides in the loop can be involved in base-pair interactions with other nucleotides in the loop. Examples of oligonucleotide sequences that can be used to form the loop include 5′-CAAGAGA-3′ and 5′-UUACAA-3′ (International Patent Application Nos. WO2013126963 and WO2014107763). It will be recognized by one of skill in the art that the resulting single chain oligonucleotide forms a stem-loop or hairpin structure comprising a double-stranded region capable of interacting with the RNAi machinery.

[0185] Synthesis of RNA silencing agents suitable for use with some embodiments of the invention can be effected as follows. First, the receptor or the receptor subunit (e.g. Grin2B) mRNA sequence is scanned downstream of the AUG start codon for AA dinucleotide sequences. Occurrence of each AA and the 3′ adjacent 19 nucleotides is recorded as potential siRNA target sites. Preferably, siRNA target sites are selected from the open reading frame, as untranslated regions (UTRs) are richer in regulatory protein binding sites. UTR-binding proteins and/or translation initiation complexes may interfere with binding of the siRNA endonuclease complex [Tuschl ChemBiochem. 2:239-245]. It will be appreciated though, that siRNAs directed at untranslated regions may also be effective, as demonstrated for GAPDH wherein siRNA directed at the 5′ UTR mediated about 90% decrease in cellular GAPDH mRNA and completely abolished protein level (www.ambion.com/techlib/tn/91/912.html).

[0186] Second, potential target sites are compared to an appropriate genomic database (e.g., human, mouse, rat etc.) using any sequence alignment software, such as the BLAST software available from the NCBI server (www.ncbi.nlm.nih.gov/BLAST/). Putative target sites which exhibit significant homology to other coding sequences are filtered out.

[0187] Qualifying target sequences are selected as template for siRNA synthesis. Preferred sequences are those including low G/C content as these have proven to be more effective in mediating gene silencing as compared to those with G/C content higher than 55%. Several target sites are preferably selected along the length of the target gene for evaluation. For better evaluation of the selected siRNAs, a negative control is preferably used in conjunction. Negative control siRNA preferably include the same nucleotide composition as the siRNAs but lack significant homology to the genome. Thus, a scrambled nucleotide sequence of the siRNA is preferably used, provided it does not display any significant homology to any other gene.

[0188] For example, suitable siRNAs directed against Grin2B can be obtained from e.g. Sigma.

[0189] It will be appreciated that, and as mentioned hereinabove, the RNA silencing agent of some embodiments of the invention need not be limited to those molecules containing only RNA, but further encompasses chemically-modified nucleotides and non-nucleotides.

[0190] According to another embodiment the RNA silencing agent may be a miRNA.

[0191] The term “microRNA”, “miRNA”, and “miR” are synonymous and refer to a collection of non-coding single-stranded RNA molecules of about 19-28 nucleotides in length, which regulate gene expression. miRNAs are found in a wide range of organisms (viruses.fwdarw.humans) and have been shown to play a role in development, homeostasis, and disease etiology.

[0192] Below is a brief description of the mechanism of miRNA activity.

[0193] Genes coding for miRNAs are transcribed leading to production of an miRNA precursor known as the pri-miRNA. The pri-miRNA may form a hairpin with a stem and loop.

[0194] The hairpin structure of the pri-miRNA is recognized by Drosha, which is an RNase III endonuclease. Drosha typically recognizes terminal loops in the pri-miRNA and cleaves the pri-miRNA with a staggered cut typical of RNase III endonucleases yielding a pre-miRNA stem loop with a 5′ phosphate and ˜2 nucleotide 3′ overhang. The pre-miRNA is then actively transported from the nucleus to the cytoplasm by Ran-GTP and the export receptor Ex-portin-5.

[0195] The double-stranded stem or the 5′ phosphate and 3′ overhang at the base of the stem loop of the pre-miRNA is then recognized by Dicer, which is also an RNase III endonuclease. Dicer then cleaves off the terminal loop two helical turns away from the base of the stem loop leaving an additional 5′ phosphate and ˜2 nucleotide 3′ overhang. The resulting siRNA-like duplex, which may comprise mismatches, comprises the mature miRNA and a similar-sized fragment known as the miRNA*. miRNA* sequences may be found in libraries of cloned miRNAs but typically at lower frequency than the miRNAs.

[0196] Although initially present as a double-stranded species with miRNA*, the miRNA eventually becomes incorporated as a single-stranded RNA into a ribonucleoprotein complex known as the RNA-induced silencing complex (RISC) while the miRNA* is removed and degraded.

[0197] The RISC identifies target nucleic acids based on high levels of complementarity between the miRNA and the mRNA, especially by nucleotides 2-7 of the miRNA.

[0198] A number of studies have looked at the base-pairing requirement between miRNA and its mRNA target for achieving efficient inhibition of translation (reviewed by Bartel 2004, Cell 116-281). In mammalian cells, the first 8 nucleotides of the miRNA may be important (Doench & Sharp 2004 GenesDev 2004-504). However, other parts of the microRNA may also participate in mRNA binding. Moreover, sufficient base pairing at the 3′ can compensate for insufficient pairing at the 5′ (Brennecke et al, 2005 PLoS 3-e85). Computation studies, analyzing miRNA binding on whole genomes have suggested a specific role for bases 2-7 at the 5′ of the miRNA in target binding but the role of the first nucleotide, found usually to be “A” was also recognized (Lewis et at 2005 Cell 120-15). Similarly, nucleotides 1-7 or 2-8 were used to identify and validate targets by Krek et al. (2005, Nat Genet 37-495).

[0199] The target sites in the mRNA may be in the 5′ UTR, the 3′ UTR or in the coding region.

[0200] miRNAs may direct the RISC to downregulate gene expression by either of two mechanisms: mRNA cleavage or translational repression. The miRNA may specify cleavage of the mRNA if the mRNA has a certain degree of complementarity to the miRNA. When a miRNA guides cleavage, the cut is typically between the nucleotides pairing to residues 10 and 11 of the miRNA. Alternatively, the miRNA may repress translation if the miRNA does not have the requisite degree of complementarity to the miRNA.

[0201] It will be appreciated from the description provided herein above that contacting cells with a miRNA may be effected by transfecting/loading the cells with e.g. the mature double stranded miRNA, the pre-miRNA or the pri-miRNA.

[0202] The pre-miRNA sequence may comprise from 45-90, 60-80 or 60-70 nucleotides.

[0203] The pri-miRNA sequence may comprise from 45-30,000, 50-25,000, 100-20,000, 1,000-1,500 or 80-100 nucleotides.

[0204] Antisense—Antisense is a single stranded RNA designed to prevent or inhibit expression of a gene by specifically hybridizing to its mRNA. Downregulation of a receptor can be effected using an antisense polynucleotide capable of specifically hybridizing with an mRNA transcript encoding the receptor or the receptor subunit (e.g. Grin2b).

[0205] Design of antisense molecules which can be used to efficiently downregulate a receptor must be effected while considering two aspects important to the antisense approach. The first aspect is delivery of the oligonucleotide into the cytoplasm of the appropriate cells, while the second aspect is design of an oligonucleotide which specifically binds the designated mRNA within cells in a way which inhibits translation thereof.

[0206] The prior art teaches of a number of delivery strategies which can be used to efficiently deliver oligonucleotides into a wide variety of cell types [see, for example, Jääskeläinen et al. Cell Mol Biol Lett. (2002) 7(2):236-7; Gait, Cell Mol Life Sci. (2003) 60(5):844-53; Martino et al. J Biomed Biotechnol. (2009) 2009:410260; Grijalvo et al. Expert Opin Ther Pat. (2014) 24(7):801-19; Falzarano et al, Nucleic Acid Ther. (2014) 24(1):87-100; Shilakari et al. Biomed Res Int. (2014) 2014: 526391; Prakash et al. Nucleic Acids Res. (2014) 42(13):8796-807 and Asseline et al. J Gene Med. (2014) 16(7-8):157-65].

[0207] In addition, algorithms for identifying those sequences with the highest predicted binding affinity for their target mRNA based on a thermodynamic cycle that accounts for the energetics of structural alterations in both the target mRNA and the oligonucleotide are also available [see, for example, Walton et al. Biotechnol Bioeng 65: 1-9 (1999)]. Such algorithms have been successfully used to implement an antisense approach in cells.

[0208] In addition, several approaches for designing and predicting efficiency of specific oligonucleotides using an in vitro system were also published (Matveeva et al., Nature Biotechnology 16: 1374-1375 (1998)].

[0209] Thus, the generation of highly accurate antisense design algorithms and a wide variety of oligonucleotide delivery systems, enable an ordinarily skilled artisan to design and implement antisense approaches suitable for downregulating expression of known sequences without having to resort to undue trial and error experimentation.

[0210] Nucleic acid agents can also operate at the DNA level as summarized infra.

[0211] Suppressing the biological function of a receptor can also be achieved by inactivating the gene (e.g., Grin2b) via introducing targeted mutations involving loss-of function alterations (e.g. point mutations, deletions and insertions) in the gene structure.

[0212] As used herein, the phrase “loss-of-function alterations” refers to any mutation in the DNA sequence of a gene which results in downregulation of the expression level and/or activity of the expressed product, i.e., the mRNA transcript and/or the translated protein. Non-limiting examples of such loss-of-function alterations include a missense mutation, i.e., a mutation which changes an amino acid residue in the protein with another amino acid residue and thereby abolishes the enzymatic activity of the protein; a nonsense mutation, i.e., a mutation which introduces a stop codon in a protein, e.g., an early stop codon which results in a shorter protein devoid of the enzymatic activity; a frame-shift mutation, i.e., a mutation, usually, deletion or insertion of nucleic acid(s) which changes the reading frame of the protein, and may result in an early termination by introducing a stop codon into a reading frame (e.g., a truncated protein, devoid of the enzymatic activity), or in a longer amino acid sequence (e.g., a readthrough protein) which affects the secondary or tertiary structure of the protein and results in a non-functional protein, devoid of the enzymatic activity of the non-mutated polypeptide; a readthrough mutation due to a frame-shift mutation or a modified stop codon mutation (i.e., when the stop codon is mutated into an amino acid codon), with an abolished enzymatic activity; a promoter mutation, i.e., a mutation in a promoter sequence, usually 5′ to the transcription start site of a gene, which results in down-regulation of a specific gene product; a regulatory mutation, i.e., a mutation in a region upstream or downstream, or within a gene, which affects the expression of the gene product; a deletion mutation, i.e., a mutation which deletes coding nucleic acids in a gene sequence and which may result in a frame-shift mutation or an in-frame mutation (within the coding sequence, deletion of one or more amino acid codons); an insertion mutation, i.e., a mutation which inserts coding or non-coding nucleic acids into a gene sequence, and which may result in a frame-shift mutation or an in-frame insertion of one or more amino acid codons; an inversion, i.e., a mutation which results in an inverted coding or non-coding sequence; a splice mutation i.e., a mutation which results in abnormal splicing or poor splicing; and a duplication mutation, i.e., a mutation which results in a duplicated coding or non-coding sequence, which can be in-frame or can cause a frame-shift.

[0213] According to specific embodiments los-of-function alteration of a gene may comprise at least one allele of the gene.

[0214] The term “allele” as used herein, refers to any of one or more alternative forms of a gene locus, all of which alleles relate to a trait or characteristic. In a diploid cell or organism, the two alleles of a given gene occupy corresponding loci on a pair of homologous chromosomes.

[0215] According to other specific embodiments loss-of-function alteration of a gene comprises both alleles of the gene.

[0216] Methods of introducing nucleic acid alterations to a gene of interest are well known in the art [see for example Menke D. Genesis (2013) 51:-618; Capecchi, Science (1989) 244:1288-1292; Santiago et al. Proc Natl Acad Sci USA (2008) 105:5809-5814; International Patent Application Nos. WO 2014085593, WO 2009071334 and WO 2011146121; U.S. Pat. Nos. 8,771,945, 8,586,526, 6,774,279 and UP Patent Application Publication Nos. 20030232410, 20050026157, US20060014264; the contents of which are incorporated by reference in their entireties] and include targeted homologous recombination (e.g. “Hit and run”, “double-replacement”), site specific recombinases (e.g. the Cre recombinase and the Flp recombinase), PB transposases (e.g. Sleeping Beauty, piggyBac, Tol2 or Frog Prince), genome editing by engineered nucleases (e.g. meganucleases, Zinc finger nucleases (ZFNs), transcription-activator like effector nucleases (TALENs) and CRISPR/Cas system) and genome editing using recombinant adeno-associated virus (rAAV) platform. Agents for introducing nucleic acid alterations to a gene of interest can be designed publically available sources or obtained commercially from Transposagen, Addgene and Sangamo Biosciences.

[0217] Methods for qualifying efficacy and detecting sequence alteration are well known in the art and include, but not limited to, DNA sequencing, electrophoresis, an enzyme-based mismatch detection assay and a hybridization assay such as PCR, RT-PCR, RNase protection, in-situ hybridization, primer extension, Southern blot, Northern Blot and dot blot analysis.

[0218] Sequence alterations in a specific gene can also be determined at the protein level using e.g. chromatography, electrophoretic methods, immunodetection assays such as ELISA and western blot analysis and immunohistochemistry.

[0219] One of the primary manifestations of GD is the pathologic accumulation of large quantities of glucosylceramide (GlcCer) in neuronal cells. Thus, in certain embodiments, the β-glucocerebrosidase activity deficiency manifests in an elevated and/or pathological accumulation of GlcCer in neurons.

[0220] One of the key criteria distinguishing GD Type 2 and 3 from GD Type 1 is the involvement of the central nervous system (CNS) and appearance of CNS-related symptoms. Therefore, in certain embodiments, the neuronal cell is a central nervous system (CNS) neuron.

[0221] As it is now known that even the GBA1 mutation found in a carrier is a high risk factor for Parkinson's Disease, it is contemplated that treatment with the NMDA antagonists according to the invention may be beneficial even for such patients having the GBA1 mutation who are predisposed to PD. Without wishing to be bound by any theory or mechanism of action it is contemplated that such treatment might delay onset of disease.

[0222] According to specific embodiments, the NMDA receptor antagonist binds specifically the NMDA receptor with no cross reactivity with other receptors.

[0223] Many compounds acting as NMDA receptor antagonists are known to possess further biological activities (as shown for example in Table 1 above). Thus, according to other specific embodiments, the NMDA receptor antagonist can modulate the activity of other receptors.

[0224] As used herein, the term “modulate” refers to altering activity either by inhibiting (i.e. antagonist) or by activating (i.e. agonist) activity and/or expression of a receptor.

[0225] According to specific embodiments, modulates activity and/or expression is inhibits activity and/or expression.

[0226] According to specific embodiments, modulates activity and/or expression is activates activity and/or expression.

[0227] Thus, in certain embodiments, the NMDA receptor antagonist also has serotonergic activity. The term “serotonergic activity” as used herein refers to the ability of the NMDA receptor antagonist to also modulate the activity of a receptor of the 5-HT receptor family.

[0228] As used herein, the term “5-HT receptor family” refers to a group of proteins that function as receptors for serotonin. The group contains subset of proteins which are encoded by genes which exhibit homology of greater than 72% or higher with each other in their deduced amino acid sequences within presumed transmembrane regions (linearly contiguous stretches of hydrophobic amino acids, bordered by charged or polar amino acids, that are long enough to form secondary protein structures that span a lipid bilayer). Four human 5-HT receptor subfamilies are known to date: 5-HT₁, 5-HT₂, 5-HT₃, and 5-HT₄.

[0229] In certain embodiments, the NMDA receptor antagonist is also a 5-HT₃ receptor antagonist.

[0230] In certain embodiments, the NMDA receptor antagonist having 5-HT₃ receptor antagonist activity is ketamine, or pharmaceutically acceptable salts, hydrates or pharmaceutically active enantiomers thereof. Each possibility represents a separate embodiment of the invention.

[0231] In certain embodiments, the NMDA receptor antagonist also has cholinergic activity. The term “cholinergic activity” as used herein refers to the ability of the NMDA receptor antagonist to also modulate the activity of a receptor of the nicotinic acetylcholine receptor (nAChR) family. In certain embodiments, the NMDA receptor antagonist is also a nicotinic acetylcholine receptor (nAChR) antagonist.

[0232] As used herein, the term “nicotinic acetylcholine receptor (nAChR) family” refers to a group of proteins that function as receptors for acetylcholine that signal for muscular contractions upon a ligand binding. In certain embodiments, the NMDA receptor antagonist having nAChR antagonist activity is selected from the group consisting of amantadine and dextromethorphan, and pharmaceutically acceptable salts, hydrates and pharmaceutically active enantiomers thereof. Each possibility represents a separate embodiment of the invention.

[0233] In certain embodiments, the NMDA receptor antagonist also has dopaminergic activity. The term “dopaminergic activity” as used herein refers to the ability of the NMDA receptor antagonist to also modulate the activity of a receptor of the dopamine receptor family.

[0234] As used herein, the term “dopamine receptor family” refers to a group of proteins that function as receptors for dopamine. The group contains subset of proteins which are encoded by genes which exhibit homology of greater than 65% with each other in their deduced amino acid sequences within presumed transmembrane regions (linearly contiguous stretches of hydrophobic amino acids, bordered by charged or polar amino acids, that are long enough to form secondary protein structures that span a lipid bilayer). Three human dopamine receptor subfamilies are known to date: dopamine D₁ receptor, dopamine D₂ receptor and dopamine D₃ receptor.

[0235] In certain embodiments, the NMDA receptor antagonist is also a dopamine D₂ receptor agonist.

[0236] In certain embodiments, the NMDA receptor antagonist having dopamine D₂ receptor agonist activity is ketamine, or pharmaceutically acceptable salts, hydrates or pharmaceutically active enantiomers thereof. Each possibility represents a separate embodiment of the invention.

[0237] In certain embodiments, the NMDA receptor antagonist also has neuro-protective activity. The term “neuro-protective activity” as used herein refers to the effects of reducing or ameliorating nervous insult, and protecting or reviving neuronal cells that have suffered nervous insult. As used herein, the term “nervous insult” refers to any damage to neuronal cell or tissue resulting from various causes such as metabolic, toxic, neurotoxic and chemical causes. In certain embodiments, the NMDA receptor antagonist is also a sigma-1 receptor agonist.

[0238] As used herein, the term “sigma-1 receptor” refers to an expression product of the SIGMAR1 gene which encodes a chaperone protein at the endoplasmic reticulum (ER) that modulates calcium signaling through the IP3 receptor.

[0239] In certain embodiments, the NMDA receptor antagonist having sigma-1 receptor agonist activity is selected from the group consisting of L-687,384, amitriptyline and 1-benzyl-6′-methoxy-6′,7′-dihydrospiro[piperidine-4,4′-thieno[3.2-c]pyran], and pharmaceutically acceptable salts, hydrates and pharmaceutically active enantiomers thereof. Each possibility represents a separate embodiment of the invention.

[0240] The present invention also contemplates combination therapy comprising the NMDA receptor antagonist described herein with standard methods of treating GD. Non-limiting examples of standard methods of treating GD include various pain reduction therapies, blood transfusions, orthopedic surgery for bone and joint involvement, bone marrow transplantation, stem cell transplantation, splenectomy, gene therapy, enzyme replacement therapy (ERT), substrate reduction therapy (SRT), and pharmacological chaperone therapy agent.

[0241] According to specific embodiments, the NMDA receptor antagonist treatment is combined with an agent selected from the group consisting of an enzyme replacement therapy agent, substrate reduction therapy agent and pharmacological chaperone therapy agent.

[0242] As used herein “enzyme replacement therapy (ERT)” refers to the exogenous administration of glucocerebrosidase (GCD). A number of health regulatory agency-approved versions of GCD are available on the market. Examples include, but are not limited to, Elelyso (taliglucerase), Cerezyme (imiglucerase), Vpriv (velaglucerase) and Ceredase (alglucerase).

[0243] As used herein, the term “Substrate reduction therapy (SRT) agent” refers to an agent (e.g. small molecule) which inhibits the synthesis of the natural substrate of the GCD, glucosylceramide (or GL1). A number of health regulatory agency-approved versions of SRT are available on the market. Examples include, but are not limited to, Miglustat (Zavesca®) and Eliglustat Tartrate.

[0244] As used herein, the term “pharmacological chaperone therapy agent” (PCT) refers to an agent (e.g. small molecule) which can promote the correct folding and stabilize mutant forms of GCD, to thereby rescue the mutated enzyme from degradation presumably in the endoplasmic reticulum (ER) or in other cellular protein degradation/disposal systems and/or prevent the accumulation of misfolded protein in the cell. Pharmacological chaperones can be designed to cross the blood brain barrier (BBB) making them candidates for the treatment of neuronopathic forms of GD that are not responsive to ERT.

[0245] The NMDA antagonists and/or the agents of some embodiments of the invention can be administered to an organism per se, or in a pharmaceutical composition where it is mixed with suitable carriers or excipients.

[0246] The term “pharmaceutical composition” as used herein refers to any composition comprising at least one pharmaceutically active ingredient and at least one pharmaceutically acceptable carrier. The purpose of a pharmaceutical composition is to facilitate administration of a compound to an organism. Herein the term “active ingredient” refers to the NMDA receptor antagonist accountable for the biological effect.

[0247] Herein, the terms “pharmaceutically acceptable carrier” and a “physiologically acceptable carrier” which may be interchangeably used refer to a non-toxic solid, semisolid or liquid filler, carrier diluent or excipient of any type that does not cause significant irritation to an organism and does not abrogate the biological activity and properties of the administered compound. An adjuvant is included under these phrases.

[0248] Herein the term “excipient” refers to an inert substance added to a pharmaceutical composition to further facilitate administration of an active ingredient. Examples, without limitation, of excipients include calcium carbonate, calcium phosphate, various sugars and types of starch, cellulose derivatives, gelatin, vegetable oils and polyethylene glycols. The term “pharmaceutically active enantiomer” as used herein refers to one or more stereoisomers of an indicated molecule, having an indicated biological activity or function. By way of example, an NMDA receptor antagonist may be used as a racemic mixture, or as enriched or purified (S) or (R) chirality drug. The relative activity of each stereoisomer may be determined using standard techniques known in the art.

[0249] Techniques for formulation and administration of drugs may be found in “Remington's Pharmaceutical Sciences,” Mack Publishing Co., Easton, Pa., latest edition, which is incorporated herein by reference.

[0250] Suitable routes of administration may, for example, include oral, rectal, transmucosal, especially transnasal, intestinal or parenteral delivery, including intramuscular, subcutaneous and intramedullary injections as well as intrathecal, direct intraventricular, intracardiac, e.g., into the right or left ventricular cavity, into the common coronary artery, intravenous, intraperitoneal, intranasal, or intraocular injections.

[0251] In certain embodiments, the NMDA receptor antagonist and/or the agents described above are formulated for oral delivery. In certain embodiments the NMDA receptor antagonist and/or the agents are formulated for sustained release. In certain embodiments, the NMDA receptor antagonist and/or the agents described above is formulated for injection.

[0252] Conventional approaches for drug delivery to the central nervous system (CNS) include: neurosurgical strategies (e.g., intracerebral injection or intracerebroventricular infusion); molecular manipulation of the agent (e.g., production of a chimeric fusion protein that comprises a transport peptide that has an affinity for an endothelial cell surface molecule in combination with an agent that is itself incapable of crossing the BBB) in an attempt to exploit one of the endogenous transport pathways of the BBB; pharmacological strategies designed to increase the lipid solubility of an agent (e.g., conjugation of water-soluble agents to lipid or cholesterol carriers); and the transitory disruption of the integrity of the BBB by hyperosmotic disruption (resulting from the infusion of a mannitol solution into the carotid artery or the use of a biologically active agent such as an angiotensin peptide). However, each of these strategies has limitations, such as the inherent risks associated with an invasive surgical procedure, a size limitation imposed by a limitation inherent in the endogenous transport systems, potentially undesirable biological side effects associated with the systemic administration of a chimeric molecule comprised of a carrier motif that could be active outside of the CNS, and the possible risk of brain damage within regions of the brain where the BBB is disrupted, which renders it a suboptimal delivery method. Alternately, one may administer the pharmaceutical composition in a local rather than systemic manner, for example, via injection of the pharmaceutical composition directly into a tissue region of a patient.

[0253] Pharmaceutical compositions of some embodiments of the invention may be manufactured by processes well known in the art, e.g., by means of conventional mixing, dissolving, granulating, dragee-making, levigating, emulsifying, encapsulating, entrapping or lyophilizing processes.

[0254] Pharmaceutical compositions for use in accordance with some embodiments of the invention thus may be formulated in conventional manner using one or more physiologically acceptable carriers comprising excipients and auxiliaries, which facilitate processing of the active ingredients into preparations which, can be used pharmaceutically. Proper formulation is dependent upon the route of administration chosen.

[0255] For injection, the active ingredients of the pharmaceutical composition may be formulated in aqueous solutions, preferably in physiologically compatible buffers such as Hank's solution, Ringer's solution, or physiological salt buffer. For transmucosal administration, penetrants appropriate to the barrier to be permeated are used in the formulation. Such penetrants are generally known in the art.

[0256] For oral administration, the pharmaceutical composition can be formulated readily by combining the active compounds with pharmaceutically acceptable carriers well known in the art. Such carriers enable the pharmaceutical composition to be formulated as tablets, pills, dragees, capsules, liquids, gels, syrups, slurries, suspensions, and the like, for oral ingestion by a patient. Pharmacological preparations for oral use can be made using a solid excipient, optionally grinding the resulting mixture, and processing the mixture of granules, after adding suitable auxiliaries if desired, to obtain tablets or dragee cores. Suitable excipients are, in particular, fillers such as sugars, including lactose, sucrose, mannitol, or sorbitol; cellulose preparations such as, for example, maize starch, wheat starch, rice starch, potato starch, gelatin, gum tragacanth, methyl cellulose, hydroxypropylmethyl-cellulose, sodium carbomethylcellulose; and/or physiologically acceptable polymers such as polyvinylpyrrolidone (PVP). If desired, disintegrating agents may be added, such as cross-linked polyvinyl pyrrolidone, agar, or alginic acid or a salt thereof such as sodium alginate.

[0257] Dragee cores are provided with suitable coatings. For this purpose, concentrated sugar solutions may be used which may optionally contain gum arabic, talc, polyvinyl pyrrolidone, carbopol gel, polyethylene glycol, titanium dioxide, lacquer solutions and suitable organic solvents or solvent mixtures. Dyestuffs or pigments may be added to the tablets or dragee coatings for identification or to characterize different combinations of active compound doses.

[0258] Pharmaceutical compositions which can be used orally, include push-fit capsules made of gelatin as well as soft, sealed capsules made of gelatin and a plasticizer, such as glycerol or sorbitol. The push-fit capsules may contain the active ingredients in admixture with filler such as lactose, binders such as starches, lubricants such as talc or magnesium stearate and, optionally, stabilizers. In soft capsules, the active ingredients may be dissolved or suspended in suitable liquids, such as fatty oils, liquid paraffin, or liquid polyethylene glycols. In addition, stabilizers may be added. All formulations for oral administration should be in dosages suitable for the chosen route of administration.

[0259] For buccal administration, the compositions may take the form of tablets or lozenges formulated in conventional manner.

[0260] For administration by nasal inhalation, the active ingredients for use according to some embodiments of the invention are conveniently delivered in the form of an aerosol spray presentation from a pressurized pack or a nebulizer with the use of a suitable propellant, e.g., dichlorodifluoromethane, trichlorofluoromethane, dichloro-tetrafluoroethane or carbon dioxide. In the case of a pressurized aerosol, the dosage unit may be determined by providing a valve to deliver a metered amount. Capsules and cartridges of, e.g., gelatin for use in a dispenser may be formulated containing a powder mix of the compound and a suitable powder base such as lactose or starch.

[0261] The pharmaceutical composition described herein may be formulated for parenteral administration, e.g., by bolus injection or continuous infusion. Formulations for injection may be presented in unit dosage form, e.g., in ampoules or in multidose containers with optionally, an added preservative. The compositions may be suspensions, solutions or emulsions in oily or aqueous vehicles, and may contain formulatory agents such as suspending, stabilizing and/or dispersing agents.

[0262] Pharmaceutical compositions for parenteral administration include aqueous solutions of the active preparation in water-soluble form. Additionally, suspensions of the active ingredients may be prepared as appropriate oily or water based injection suspensions. Suitable lipophilic solvents or vehicles include fatty oils such as sesame oil, or synthetic fatty acids esters such as ethyl oleate, triglycerides or liposomes. Aqueous injection suspensions may contain substances, which increase the viscosity of the suspension, such as sodium carboxymethyl cellulose, sorbitol or dextran. Optionally, the suspension may also contain suitable stabilizers or agents which increase the solubility of the active ingredients to allow for the preparation of highly concentrated solutions.

[0263] Alternatively, the active ingredient may be in powder form for constitution with a suitable vehicle, e.g., sterile, pyrogen-free water based solution, before use.

[0264] The pharmaceutical composition of some embodiments of the invention may also be formulated in rectal compositions such as suppositories or retention enemas, using, e.g., conventional suppository bases such as cocoa butter or other glycerides.

[0265] Pharmaceutical compositions suitable for use in context of some embodiments of the invention include compositions wherein the active ingredients are contained in an amount effective to achieve the intended purpose. More specifically, a therapeutically effective amount means an amount of active ingredients (e.g. NMDA receptor antagonist) effective to prevent, alleviate or ameliorate symptoms of a disorder (e.g., GD, e.g. Type 3 GD) or prolong the survival of the subject being treated.

[0266] Determination of a therapeutically effective amount is well within the capability of those skilled in the art, especially in light of the detailed disclosure provided herein.

[0267] For any preparation used in the methods of the invention, the therapeutically effective amount or dose can be estimated initially from in vitro and cell culture assays. For example, a dose can be formulated in animal models to achieve a desired concentration or titer. Such information can be used to more accurately determine useful doses in humans.

[0268] Toxicity and therapeutic efficacy of the active ingredients described herein can be determined by standard pharmaceutical procedures in vitro, in cell cultures or experimental animals. The data obtained from these in vitro and cell culture assays and animal studies can be used in formulating a range of dosage for use in human. The dosage may vary depending upon the dosage form employed and the route of administration utilized. The exact formulation, route of administration and dosage can be chosen by the individual physician in view of the patient's condition. (See e.g., Fingl, et al., 1975, in “The Pharmacological Basis of Therapeutics”, Ch. 1 p. 1).

[0269] Dosage amount and interval may be adjusted individually to provide that levels of the active ingredient are sufficient to induce or suppress the biological effect (minimal effective concentration, MEC). The MEC will vary for each preparation, but can be estimated from in vitro data. Dosages necessary to achieve the MEC will depend on individual characteristics and route of administration. Detection assays can be used to determine plasma concentrations.

[0270] Depending on the severity and responsiveness of the condition to be treated, dosing can be of a single or a plurality of administrations, with course of treatment lasting from several days to several weeks or until cure is effected or diminution of the disease state is achieved.

[0271] The amount of a composition to be administered will, of course, be dependent on the subject being treated, the severity of the affliction, the manner of administration, the judgment of the prescribing physician, etc.

[0272] Compositions of some embodiments of the invention may, if desired, be presented in a pack or dispenser device, such as an FDA approved kit, which may contain one or more unit dosage forms containing the active ingredient. The pack may, for example, comprise metal or plastic foil, such as a blister pack. The pack or dispenser device may be accompanied by instructions for administration. The pack or dispenser may also be accommodated by a notice associated with the container in a form prescribed by a governmental agency regulating the manufacture, use or sale of pharmaceuticals, which notice is reflective of approval by the agency of the form of the compositions or human or veterinary administration. Such notice, for example, may be of labeling approved by the U.S. Food and Drug Administration for prescription drugs or of an approved product insert. Compositions comprising a preparation of the invention formulated in a compatible pharmaceutical carrier may also be prepared, placed in an appropriate container, and labeled for treatment of an indicated condition, as is further detailed above.

[0273] According to another aspect of the present invention there is provided a kit identified for use in treating neuropathic form of Gaucher Disease (GD), comprising a packaging material packaging an NMDA receptor antagonist and an agent selected from the group consisting of an enzyme replacement therapy agent, substrate reduction therapy agent and pharmacological chaperone therapy agent.

[0274] As further shown in Example 4 of the Examples section which follows the inventors have uncovered that the presence of guanine in a single nucleotide variation (SNP ID rs29869040) in a non-coding sequence of the Grin2b gene correlates with nGD, while the presence of adenine in this SNP correlates with relative CBE-insensitivity and more moderate phenotypes of GD; in addition Grin2b mRNA and protein expression levels correlate with severe nGD.

[0275] Thus, the teachings of the invention can be also used to diagnose neuropathic form of GD in a patient, by determining sequence variation in the Grin2B gene or amount of an expression product of the Grin2B gene.

[0276] Thus, according to an aspect of the present invention, there is provided a method of diagnosing neuropathic form of Gaucher Disease (GD) in a patient, the method comprising

determining in a biological sample of the patient a sequence variation that affects an amount of an expression product of a Grin2B gene and/or an amount of an expression product of a Grin2B gene, wherein presence of the sequence variation, an amount of the expression product above a predetermined level and/or increased amount of the expression product relative to a biological sample of a healthy patient or a patient diagnosed with GD type I is indicative of a neuropathic form of GD, thereby diagnosing neuropathic form of GD in the patient.

[0277] According to specific embodiments, the patient or subject is diagnosed with GD.

[0278] According to another aspect of the present invention, there is provided a method of treating a patient diagnosed with neuropathic form of Gaucher Disease (GD), the method comprising:

[0279] (a) diagnosing the patient according to the method of some embodiments of the invention; and wherein presence of the sequence variation and/or an amount of the expression product above a predetermined level and/or increased amount expression product relative to a biological sample of a healthy patient or a patient diagnosed with GD type I is indicated,

[0280] (b) treating the patient with a NMDA receptor antagonist, thereby treating the patient diagnosed with neuropathic form of GD.

[0281] To determine sequence variation, DNA is first obtained from a biological sample of the tested subject. Biological samples that can be used according to specific embodiments of the present invention include, but are not limited to, body fluids such as whole blood, serum, plasma, cerebrospinal fluid, urine, lymph fluids, and various external secretions of the respiratory, intestinal and genitourinary tracts, tears, saliva, milk as well as white blood cells, malignant tissues, amniotic fluid and chorionic villi, and cell or tissue biopsy (e.g. brain biopsy).

[0282] Once the sample is obtained, DNA is extracted using methods which are well known in the art. As described herein above methods of detecting sequence variations are well known in the art and include, but not limited to, DNA sequencing, electrophoresis, an enzyme-based mismatch detection assay and a hybridization assay such as PCR, RT-PCR, RNase protection, in-situ hybridization, primer extension, Southern blot, Northern Blot and dot blot analysis. Sequence variations in a specific gene can also be determined at the protein level using e.g. chromatography, electrophoretic methods, immunodetection assays such as ELISA and western blot analysis and immunohistochemistry. According to specific embodiments, the sequence variation (e.g. SNP) is determined using genomic sequence analysis.

[0283] According to specific embodiments of the invention, detection of the sequence variation is performed by hybridizing the biological sample, the cell, or fractions or extracts thereof with a probe (e.g. oligonucleotide probe or primer) which specifically hybridizes with a polynucleotide comprising the sequence variation (e.g. SNP). Detailed description on probes that can be used in the present invention is further provided hereinbelow. According to specific embodiments, the hybridizing is effected under conditions which allow the formation of a complex comprising DNA comprising a sequence variation (e.g. SNP) present in the cell and the probe.

[0284] According to other specific embodiments of the invention, detection of the sequence variation is performed by contacting the biological sample, the cell, or fractions or extracts thereof with an antibody which specifically binds to a polypeptide comprising the sequence variation (e.g. SNP). According to specific embodiments, the contacting is effected under conditions which allow the formation of a complex comprising a polypeptide comprising the sequence variation (e.g. SNP) present in the cell and the antibody (i.e. immunocomplex).

[0285] The nucleotide/probe complex or immunocomplex can be formed at a variety of temperatures, salt concentration and pH values which may vary depending on the method and the biological sample used and those of skills in the art are capable of adjusting the conditions suitable for the formation of each complex.

[0286] According to specific embodiments, the sequence variation is an SNP.

[0287] According to specific embodiments, the sequence variation is in a non-coding sequence of the Grin2B gene.

[0288] As used herein, the phrases “level of expression” and “amount of expression” refers to the degree of gene expression and/or gene product activity in a biological sample. For example, up-regulation or down-regulation of various genes can affect the level of the gene product (i.e., RNA and/or protein).

[0289] It should be noted that the level of expression can be determined in arbitrary absolute units, or in normalized units (relative to known expression levels of a control reference). For example, when using DNA chips, the expression levels are normalized according to the chips' internal controls or by using quantile normalization such as RMA.

[0290] According to specific embodiments the amount of expression is determined using an RNA and/or a protein detection method.

[0291] According to specific embodiments the detection method is selected from the group consisting of PCR, oligonucleotide microarray, immunoprecipitation, Western blot analysis and FACS.

[0292] According to some embodiments of the invention, the RNA or protein molecules are extracted from the cell of the subject. Thus, according to specific embodiments, the method further comprises extracting a RNA or a protein from the cell prior to the comparing.

[0293] Methods of extracting RNA or protein molecules from cells of a subject are well known in the art. The extracted RNA can be further processed to a cDNA. Methods of and commercially available kits for converting RNA to cDNA are well known in the art and include e.g. the use of the enzyme reverse transcriptase. Once obtained, the RNA, cDNA or protein molecules can be characterized for the expression and/or activity level of various RNA, cDNA and/or protein molecules using methods known in the arts.

[0294] According to specific embodiment, the expression of the Grin2B gene can be determined at the nucleic acid level using RNA or DNA detection methods.

[0295] Thus, according to some embodiments of the invention, detection of the expression level of the RNA of the Grin2B pathway is performed by hybridizing the biological sample, the cell, or fractions or extracts thereof with a probe (e.g. oligonucleotide probe or primer) which specifically hybridizes with a polynucleotide expressed from the Grin2B gene (e.g., including any alternative spliced form which is known in the art). Such a probe can be at any size, such as a short polynucleotide (e.g., of 15-200 bases), an intermediate polynucleotide of 100-2000 bases and a long polynucleotide of more than 2000 bases.

[0296] The probe used by the present invention can be any directly or indirectly labeled RNA molecule [e.g., RNA oligonucleotide (e.g., of 17-50 bases), an in vitro transcribed RNA molecule], DNA molecule (e.g., oligonucleotide, e.g., 15-50 bases, cDNA molecule, genomic molecule) and/or an analogue thereof [e.g., peptide nucleic acid (PNA)] which is specific to the RNA transcript of the Grin2B gene. According to specific embodiments, the probe is bound to a detectable moiety.

[0297] Oligonucleotides designed according to the teachings of the present invention can be generated according to any oligonucleotide synthesis method known in the art such as enzymatic synthesis or solid phase synthesis.

[0298] According to specific embodiments, the hybridizing is effected under conditions which allow the formation of a complex comprising mRNA or cDNA of a Grin2B gene present in the cell and the probe. The complex can be formed at a variety of temperatures, salt concentration and pH values which may vary depending on the method and the biological sample used and those of skills in the art are capable of adjusting the conditions suitable for the formation of each nucleotide/probe complex.

[0299] Thus, according to an aspect of the present invention there is provided a composition of matter comprising a polynucleotide sample of a patient diagnosed with Gaucher Disease (GD), and an oligonucleotide capable of specifically hybridizing with a polynucleotide expressed from a Grin2B gene and optionally wherein said oligonucleotide is labeled.

[0300] Non-limiting examples of methods of detecting RNA and/or cDNA molecules in a cell sample include Northern blot analysis, RT-PCR [e.g., a semi-quantitative RT-PCR, quantitative RT-PCR using e.g., the Light Cycler™ (Roche)], RNA in situ hybridization (using e.g., DNA or RNA probes to hybridize RNA molecules present in the cells or tissue sections), in situ RT-PCR (e.g., as described in Nuovo G J, et al. Am J Surg Pathol. 1993, 17: 683-90; Komminoth P, et al. Pathol Res Pract. 1994, 190: 1017-25), and oligonucleotide microarray (e.g., by hybridization of polynucleotide sequences derived from a sample to oligonucleotides attached to a solid surface [e.g., a glass wafer) with addressable location, such as Affymetrix microarray (Affymetrix®, Santa Clara, Calif.)].

[0301] As mentioned, according to specific embodiments, the expression of the Grin2B gene can be determined at the amino acid level using protein detection methods.

[0302] Thus, according to some embodiments of the invention, detection of the expression level of the protein of the Grin2B is performed by contacting the biological sample, the cell, or fractions or extracts thereof with an antibody which specifically binds to a polypeptide expressed from the Grin2B gene of (e.g., including any variants thereof which is known in the art). According to specific embodiments, the contacting is effected under conditions which allow the formation of a complex comprising polypeptide of a Grin2B gene involved present in the cell and the antibody (i.e. immunocomplex).

[0303] The immunocomplex can be formed at a variety of temperatures, salt concentration and pH values which may vary depending on the method and the biological sample used and those of skills in the art are capable of adjusting the conditions suitable for the formation of each immunocomplex.

[0304] Thus, according to an aspect of the present invention there is provided a composition of matter comprising a composition of matter comprising a polypeptide sample of a patient diagnosed with Gaucher Disease (GD), and an antibody capable of specifically binding a polypeptide expressed from a Grin2B gene and optionally a secondary antibody.

[0305] Non-limiting examples of methods of detecting the level and/or activity of specific protein molecules in a cell sample include Enzyme linked immunosorbent assay (ELISA), Western blot analysis, immunoprecipitation (IP), radio-immunoassay (RIA), Fluorescence activated cell sorting (FACS), immunohistochemical analysis, in situ activity assay (using e.g., a chromogenic substrate applied on the cells containing an active enzyme), in vitro activity assays (in which the activity of a particular enzyme is measured in a protein mixture extracted from the cells) and molecular weight-based approach. For example, in case the detection of the expression level of a secreted protein is desired, ELISA assay may be performed on a sample of fluid obtained from the subject (e.g., serum), which contains cell-secreted content.

[0306] According to specific embodiments, the antibody used by the present invention can be any directly or indirectly labeled antibody. According to specific embodiments, the oligonucleotide is bound to a detectable moiety.

[0307] The detectable moiety used by some embodiments of the invention can be, but is not limited to a fluorescent chemical (fluorophore), a phosphorescent chemical, a chemiluminescent chemical, a radioactive isotope (such as ^{[125]}iodine), an enzyme, a fluorescent polypeptide, an affinity tag, and molecules (contrast agents) detectable by Positron Emission Tomagraphy (PET) or Magnetic Resonance Imaging (MRI).

[0308] As described above, the level of expression of Grin2B gene in a biological sample of the patient is compared to the level of expression of the at least one gene in a biological sample of a healthy patient or a patient diagnosed with GD type I.

[0309] As used herein, the term “healthy patient” refers to a patient not afflicted with GD.

[0310] As described above, presence of sequence variation that affects an amount of an expression product of a Grin2B gene, an amount of said expression product above a predetermined level and/or increased amount of said expression product relative to a biological sample of a healthy patient or a patient diagnosed with GD type I is indicative of a neuropathic form of GD.

[0311] As used herein the phrase “an amount above a predetermined threshold” or “increased amount” refers to at least a statistically significant upregulation with respect to the amount found in a similar biological sample of a healthy subject using the same method of quantification.

[0312] According to specific embodiments the increased amount is by at least 5%, at least 10%, at least 20%, at least 30%, at least 40%, at least 50%, at least 60%, at least 70%, at least 80%, at least 90%, at least 95%, at least 100% or more, higher than about 2 times, higher than about three times, higher than about four time, higher than about five times, higher than about six times, higher than about seven times, higher than about eight times, higher than about nine times, higher than about 20 times, higher than about 50 times, higher than about 100 times, higher than about 200 times, higher than about 350, higher than about 500 times, higher than about 1000 times, or more relative to the control sample.

[0313] It is expected that during the life of a patent maturing from this application many relevant NMDA receptor antagonists will be developed and the scope of the term “NMDA receptor antagonist” is intended to include all such new technologies a priori.

[0314] As used herein the term “about” refers to ±10%

[0315] The terms “comprises”, “comprising”, “includes”, “including”, “having” and their conjugates mean “including but not limited to”.

[0316] The term “consisting of” means “including and limited to”.

[0317] The term “consisting essentially of” means that the composition, method or structure may include additional ingredients, steps and/or parts, but only if the additional ingredients, steps and/or parts do not materially alter the basic and novel characteristics of the claimed composition, method or structure.

[0318] As used herein, the singular form “a”, “an” and “the” include plural references unless the context clearly dictates otherwise. For example, the term “a compound” or “at least one compound” may include a plurality of compounds, including mixtures thereof.

[0319] Throughout this application, various embodiments of this invention may be presented in a range format. It should be understood that the description in range format is merely for convenience and brevity and should not be construed as an inflexible limitation on the scope of the invention. Accordingly, the description of a range should be considered to have specifically disclosed all the possible subranges as well as individual numerical values within that range. For example, description of a range such as from 1 to 6 should be considered to have specifically disclosed subranges such as from 1 to 3, from 1 to 4, from 1 to 5, from 2 to 4, from 2 to 6, from 3 to 6 etc., as well as individual numbers within that range, for example, 1, 2, 3, 4, 5, and 6. This applies regardless of the breadth of the range.

[0320] Whenever a numerical range is indicated herein, it is meant to include any cited numeral (fractional or integral) within the indicated range. The phrases “ranging/ranges between” a first indicate number and a second indicate number and “ranging/ranges from” a first indicate number “to” a second indicate number are used herein interchangeably and are meant to include the first and second indicated numbers and all the fractional and integral numerals therebetween.

[0321] As used herein the term “method” refers to manners, means, techniques and procedures for accomplishing a given task including, but not limited to, those manners, means, techniques and procedures either known to, or readily developed from known manners, means, techniques and procedures by practitioners of the chemical, pharmacological, biological, biochemical and medical arts.

[0322] When reference is made to particular sequence listings, such reference is to be understood to also encompass sequences that substantially correspond to its complementary sequence as including minor sequence variations, resulting from, e.g., sequencing errors, cloning errors, or other alterations resulting in base substitution, base deletion or base addition, provided that the frequency of such variations is less than 1 in 50 nucleotides, alternatively, less than 1 in 100 nucleotides, alternatively, less than 1 in 200 nucleotides, alternatively, less than 1 in 500 nucleotides, alternatively, less than 1 in 1000 nucleotides, alternatively, less than 1 in 5,000 nucleotides, alternatively, less than 1 in 10,000 nucleotides.

[0323] It is appreciated that certain features of the invention, which are, for clarity, described in the context of separate embodiments, may also be provided in combination in a single embodiment. Conversely, various features of the invention, which are, for brevity, described in the context of a single embodiment, may also be provided separately or in any suitable subcombination or as suitable in any other described embodiment of the invention. Certain features described in the context of various embodiments are not to be considered essential features of those embodiments, unless the embodiment is inoperative without those elements.

[0324] Various embodiments and aspects of the present invention as delineated hereinabove and as claimed in the claims section below find experimental support in the following examples. They should, in no way be construed, however, as limiting the broad scope of the invention.

### Examples

[0325] Reference is now made to the following examples, which together with the above descriptions illustrate some embodiments of the invention in a non limiting fashion. Generally, the nomenclature used herein and the laboratory procedures utilized in the present invention include molecular, biochemical, microbiological and recombinant DNA techniques. Such techniques are thoroughly explained in the literature. See, for example, “Molecular Cloning: A laboratory Manual” Sambrook et al., (1989); “Current Protocols in Molecular Biology” Volumes I-III Ausubel, R. M., ed. (1994); Ausubel et al., “Current Protocols in Molecular Biology”, John Wiley and Sons, Baltimore, Md. (1989); Perbal, “A Practical Guide to Molecular Cloning”, John Wiley & Sons, New York (1988); Watson et al., “Recombinant DNA”, Scientific American Books, New York; Birren et al. (eds) “Genome Analysis: A Laboratory Manual Series”, Vols. 1-4, Cold Spring Harbor Laboratory Press, New York (1998); methodologies as set forth in U.S. Pat. Nos. 4,666,828; 4,683,202; 4,801,531; 5,192,659 and 5,272,057; “Cell Biology: A Laboratory Handbook”, Volumes I-III Cellis, J. E., ed. (1994); “Culture of Animal Cells—A Manual of Basic Technique” by Freshney, Wiley-Liss, N. Y. (1994), Third Edition; “Current Protocols in Immunology” Volumes I-III Coligan J. E., ed. (1994); Stites et al. (eds), “Basic and Clinical Immunology” (8th Edition), Appleton & Lange, Norwalk, Conn. (1994); Mishell and Shiigi (eds), “Selected Methods in Cellular Immunology”, W. H. Freeman and Co., New York (1980); available immunoassays are extensively described in the patent and scientific literature, see, for example, U.S. Pat. Nos. 3,791,932; 3,839,153; 3,850,752; 3,850,578; 3,853,987; 3,867,517; 3,879,262; 3,901,654; 3,935,074; 3,984,533; 3,996,345; 4,034,074; 4,098,876; 4,879,219; 5,011,771 and 5,281,521; “Oligonucleotide Synthesis” Gait, M. J., ed. (1984); “Nucleic Acid Hybridization” Hames, B. D., and Higgins S. J., eds. (1985); “Transcription and Translation” Hames, B. D., and Higgins S. J., eds. (1984); “Animal Cell Culture” Freshney, R. I., ed. (1986); “Immobilized Cells and Enzymes” IRL Press, (1986); “A Practical Guide to Molecular Cloning” Perbal, B., (1984) and “Methods in Enzymology” Vol. 1-317, Academic Press; “PCR Protocols: A Guide To Methods And Applications”, Academic Press, San Diego, Calif. (1990); Marshak et al., “Strategies for Protein Purification and Characterization—A Laboratory Course Manual” CSHL Press (1996); all of which are incorporated by reference as if fully set forth herein. Other general references are provided throughout this document. The procedures therein are believed to be well known in the art and are provided for the convenience of the reader. All the information contained therein is incorporated herein by reference.

### Materials and Methods

[0326] Mice—Pure inbred mouse strains were obtained from the Jackson laboratories (USA), Harlan UK and Harlan Israel. Specifically, BTBR T⁺ Itpr3^{tf/J} C3H/HeJ, DBA/2J, MRL/MpJ, WSB/EiJ, MOLF/Ei, PWD/PhJ, KK/HiJ, BPL/1J, I/LnJ, BPN/3J, and LP/J were obtained from Jackson; A/J, AKR/J, NZW/LacJ, 129S1/SvImJ were obtained from Harlan laboratories in the UK; and C57BL/6JOlaHsd, BALB/cJ and FVB/NJ were obtained from the Harlan laboratories in Israel. Gba^{flox/flox}; nestin-Cre mice, a mouse model of GD were generated as described in Vitner et al. Nature Medicine (2014) 20: 204-208; and Enquist, I. B. et al. Proc. Natl. Acad. Sci. USA (2007) 104: 17483-17488. These mice recapitulate many features of human nGD, although their Gba1 deficiency is restricted to neural and macroglial lineages. Mice were maintained under specific pathogen-free conditions and handled according to protocols approved by the Weizmann Institute Animal Care Committee according to international guidelines.

[0327] CBE injections—Conduritol-β-epoxide (CBE) was obtained from Calbiochem Millipore (Darmstadt, Germany). CBE at a dose of 25 mg or 50 mg per kg body weight per day or PBS (control) were administered i.p. to mice daily starting from postnatal day 8 (P8) of age.

[0328] Treatment with NMDA receptor agonists and antagonists—All agonists and antagonists were administered daily from P8. D-cycloserine (Sigma) was administered daily at a dose of 200 mg/kg/day. MK-801 (Sigma) was administered daily at a dose of 0.3 mg/Kg/day. Memantine (Sigma) was administered daily at a dose of 3 or 30 mg/Kg/day. Ifenprodil (Sigma) was administered daily at a dose of 9 mg/Kg/day.

[0329] Immunohistochemistry—Mice were sacrificed and whole brains were fixed in 4% paraformaldehyde:PBS overnight at 4° C. Tissues were washed in PBS and sectioned with a microtome. Forty micrometer coronal sections were processed free floating in 2% BSA, 0.2% Triton X-100, PBS through all blocking, antibody incubation, and wash steps. Sections were incubated overnight at 4° C. with primary anti rat CD68 (AbD Serotec, Oxford, UK; 1:1000). Following washes, sections were incubated with secondary Cy2-conjugated donkey anti-rat antibody (1:200, Jackson). The presence of CD68-positive cells in cortical layer V of the brain was analyzed using an epifluorescent microscope (Zeiss).

[0330] RNA extraction and quantitative PCR Following treatment, mice were sacrificed and their brains removed, placed on a Young Mouse Brain Slicer Matrix (BSMYS001-1, Zivic instruments, Pittsburgh, Pa., USA) and cut into 1 mm coronal sections. The cerebral cortex was separated using a spatula and snap-frozen in liquid N₂ and stored at −80° C. Total RNA was isolated using the RNeasy mini kit (Qiagen GmbH, Hilden, Germany) according to manufacturer's instructions. Quantitative polymerase chain reaction (Q-PCR) was performed using PerfeCTa SYBR Green FastMix (Quanta BioSciences, Gaithersburg, Md., USA) and an ABI Prism 7300 Sequence Detection System (Applied Biosystems, Foster City, Calif., USA). The primer concentration was 13 nM in a reaction volume of 20 μl and cDNA equivalent to 2 ng of total RNA. Each reaction was performed in three biological replicates and four technical triplicates. The thermal cycling parameters were as follows: step 1, 95° C. for 10 minutes; step 2, 95° C. for 15 seconds, 60° C. for 30 seconds and 68° C. for 30 seconds. Step 2 was repeated for 40 cycles and was followed by a dissociation step. Fold-change in mRNA levels was calculated using the comparative cycle threshold method using TATA box binding protein (TBP) for normalization. P-values were calculated using a two-tailed, two-independent sample Student's t-test. Primers sequences were as follows:

Grin2b forward primer (SEQ ID NO: 2):
5′-CGCCCAGATCCTCGATTTCA-3′;
Grin2b reverse prime (SEQ ID NO: 3):
5′-CTGGAAGAACATGGAGGACTCA-3′.
Tbp forward primer (SEQ ID NO: 4):
5′-TGCTGTTGGTGATTGTTGGT-3′;
and
Tbp reverse primer (SEQ ID NO: 5):
5′-CTGGCTTGTGTGGGAAAGAT-3′;

[0331] GBA1 activity assay—GBA1 activity was performed as previously described (Farfel-Becker et al. Hum Mol Genet. 2014; 23(4):843-54). Briefly, frozen half-brain samples were sonicated in Mcllvaine's buffer (0.1 M citric acid, pH 4.2, 0.2 M Na₂HPO₄, 29:21, vol:vol). Tissue homogenates containing 50 μg of protein were incubated at 37° C. with 8 μM C6-NBD-GlcCer (Avanti Polar Lipids, Alabaster, Ala., USA) in a final volume of 25 μl Mcllvaine's buffer for 30 minutes. Lipids were extracted and the lower phase separated by thin layer chromatography using chloroform:methanol:9.8 mM CaCl2 (60:35:8, vol:vol:vol) as the developing solvent. C6-NBD-ceramide was identified with an authentic standard using a Typhoon 9410 variable mode imager and bands were quantified by Image-QuantTL (GE Healthcare, Chalfont St Giles, UK).

[0332] Sphingolipid analysis—LC-ESI-MS/MS was performed using an ABI 4000 quadrupole-linear ion trap mass spectrometer as previously described (Farfel-Becker et al. Hum Mol Genet. 2014; 23(4):843-54). The sphingolipid internal standards were obtained from Avanti Polar Lipids (Alabaster, Ala., USA).

[0333] Genome-Wide Association Studies—GWA mapping was performed on quantitative lifespan phenotypes by efficient mixed-model association (EMMA), using individual single-nucleotide polymorphism (SNP) associations as previously described (Kang et al, 2008). EMMA corrects for genetic relatedness and population structure, minimizing false associations. To assure high mapping resolution of the mouse genome, the association was performed using 4,000,000 SNPs/strain. The threshold for genome-wide significance after stringent Bonferroni correction was 1.25×10⁻⁸. Although it has been previously demonstrated that p<0.05 genome-wide equivalent for GWA using EMMA in the Hybrid mouse diversity panel (HMDP) is p=4.1×10⁻⁶ (Kang et al, 2008), to avoid false associations P values ≦1×10⁻⁷ were considered as significant. The Manhattan plot was generated using the R package (Turner S D. qqman: an R package for visualizing GWAS results using Q-Q and Manhattan plots. bioRxiv doi:://dx.doi.org/10.1101/005165).

[0334] Locomotor testing—Locomotor coordination was weekly evaluated in the treated strains by the hanging wire test, a validated test for LSD mouse models (Alvarez et al. 2008). Briefly, the mouse was placed with forepaws at a center of a horizontal bar (3 mm diameter; 35 mm long). The body position of the animal was observed for 30 seconds and scored as previously described (Alvarez et al. FASEB J. 2008; 22(10): 3617-27): 0=falls off within 10 seconds; 1, =hangs onto bar by two forepaws; 2=attempts to climb onto bar; 3=hangs onto bar by two forepaws plus one or both hindpaws; 4=hangs by all four paws plus tail wrapped around bar; and 5=active escape to the end of bar.

[0335] Human Samples and WB—Human brains samples were obtained with informed consent. Homogenates were prepared as described (Vitner et al 2014). Blots were incubated with anti NR2B (1:1000, Millipore, 06-600) and GAPDH (1:10,000, Chemicon, MAB374) antibodies.

[0336] Statistical analyses—All data are shown as mean±SEM. Comparisons between two samples were performed using a two-tailed Student's t-test. P<0.05 was considered statistically significant.

### Example 1. Selection of a Mouse Model for Neuropathic Gaucher Disease (nGD)

[0337] To study the potential of different mouse stains to serve as a reliable model for Type 2/3 GD, 15 different inbred mouse strains were chosen. CBE has been used to induce GD in mice for many years (Mumford et al., 1975), and it was used to generate the first animal model for GD disease. CBE is water soluble and crosses the blood brain barrier. The 15 mice strains chosen have diverse phylogenetic origins and their SNP profile is freely available (FIG. 1A). Mice were daily injected i.p. with 25 mg/kg/day of CBE starting on postnatal day 8 and for the rest of their lives (Vitner et al., 2014). The survival of the 15 mice strains was followed for over 200 days, as summarized in FIG. 1B and Table 2 below. The results obtained show that each mouse strain reacts differently to GD induction by CBE. The strains could be divided into two groups: mice in the first group were very homogeneous in their behavior; they developed a very aggressive disease with a short life span. The second group of strains presented a much longer life expectancy with a broader spectrum of phenotypes. Among each strain, the life span variability was low, suggesting that the response to CBE treatment in each strain is a consequence of the genetic background.

[0338] To further characterize the effect of CBE treatment on the different strains, motor behavior was followed weekly using the hanging wire test, starting at postnatal day 21 for a period of 2 months. The hanging wire test evaluates coordination and locomotor function, wherein a high score means better coordination. As shown in FIG. 1C, the short living CBE-treated strains also showed poor motor behaviors starting at very early time points; while the long living strains presented higher motor behavior values. Some strains which presented long life spans, such as SV129 and BALB/c, showed poor motor behavior at later stages, while others such as KK/HIJ had high motor scores at all time points tested. Independently of the strain, the PBS-treated mice showed high hanging wire test scores, indicating that the differences in motor behavior resulted as a consequence of CBE treatment (FIG. 1C). Of note, strains PWD/PhJ and WSB/EiJ were excluded in the motor behavior analysis due to their wild behavior.

[0339] To verify the results of Example 1, the presence of CD68-positive cells in the cortical layer V of the brain was analyzed in two exemplary strains, AKR/J (average mortality on day 24) and BTBR T^{+ITPR3TF/J} (100% mortality on day 199). As is illustrated in FIG. 2, the AKR/J mice which are more prone to mortality by CBE also demonstrated overt brain pathology indicating that they can be used as a good model for Type 2 and/or 3 GD, while the BTBR T^{+ITPR3TF/J} mice are less sensitive to CBE both in terms of mortality and brain pathology.

[0340] Taken together, of the strains tested, A/J, AKR/J, C3H/HeJ, DBA/2J, MRL/MpJ, C57BL/6J, WSB/EiJ and MOLF/EiJ were found to be most sensitive to CBE, providing a good mouse model for Type 2/3 GD.

### Example 2. GBA1 Activity and Lipid Levels in the Brains of the Different Mouse Strains do not Correlate with the Differences in Survival Rates

[0341] To eliminate the possibility that the phenotypic differences observed in the different mouse strains were caused by differential CBE metabolism in the brain, GBA1 enzymatic activity in mice treated for 10 days with CBE or PBS (control) was measured. As evident in FIG. 3A, CBE significantly reduced, to the same extent, cerebral GBA1 activity in all strains tested. Overall, the remaining GBA1 activity was 5-10% of the controls (FIG. 3A). There was no correlation between GBA1 activity in the brain and life spans neither in the PBS(R²=0.126, data not shown) nor CBE conditions (R²=0.0581, FIG. 3B). In addition, no correlation was found between inhibition of GBA1 activity and life span when evaluated according to strains (R²=0.0085, data not shown).

[0342] In the next step, the consequences of GBA1 inhibition, GlcCer accumulation, was analyzed. As expected, CBE-treated mice presented higher levels of GlcCer in the brain in comparison to the controls. The average elevation in GlcCer levels in CBE-treated brains was 3.7-fold compared to PBS-treated mice (FIG. 3C). C18, the most abundant GlcCer species in the brain, was the main GlcCer species elevated (not shown). Importantly, there was no correlation between the levels of GlcCer in the brain and life spans either in the PBS(R²=0.1441, data not shown) or CBE conditions (R²=0.0569, FIG. 3C). There was also no correlation between the change in GlcCer levels in each strain and the life spans (R²=0.0311, data not shown). In addition, no correlation was found between each individual GlcCer subspecies (C14, C16, C18:1, C18, C20, C22, C24:1, C24, C26:1, and C26) and life spans under PBS and CBE conditions (data not shown).

[0343] Glucosylsphingosine (GlcSo) is another lipid known to be elevated in GD and it has been proposed as a GD biomarker (Rolfs et al. PLoS One. 2013 Nov. 20; 8(11):e79732). An average elevation of ˜36-fold in GlcSo levels was found in the CBE-treated brains as compared to the controls (FIG. 3D). The potential correlation between GlcSo levels and the life spans of mice was explored—no correlation was found either under PBS(R²=0.068, data not shown), or in the CBE-treated brains (R²=0.0013, FIG. 3D). Similarly to the other lipids, there was no correlation between the change in GlcSo levels and mice life spans (R²=0.0775, data not shown).

[0344] In addition, GalCer and GalSo levels were analyzed in the brains of the treated mice (FIGS. 3E-3F). CBE-treated mice showed no elevation in these lipids and there was no correlation between lipid levels and mice life spans (R²=0.0975 and 6×10⁻⁵ for GalCer and GalSo respectively).

[0345] Taken together, the lack of correlation between GBA1 activity or lipids levels and mice life span indicates that the phenotypic differences observed in the tested strains are not due to differential metabolism of CBE or differential accumulation of levels of GlcCer or GlcSPh, indicating involvement of modifier genes.

### Example 3. Genome Wide Association Study

[0346] To discover novel genes involved in GD progression, a Genome Wide Association Study (GWAS) was performed for the 15 inbred strains mentioned above. GWAS in model organisms has great potential to identify risk factors for complex traits related to human diseases (Frazeret al., 2007; Peters et al., 2007). Model organism-association mapping is potentially more powerful than human association mapping because it is possible to reduce the effect of environmental factors by replicating phenotype measurements in genetically identical organisms (Peters et al., 2007). Moreover, the information generated in many of the ongoing genotyping projects in model organisms is freely-available, allowing in-silico mapping of complex traits in model organisms. For example, recent advances in genomic sequence analysis and SNP discovery have led to the availability of dense SNP maps for a large number of inbred strains of mice (Kirby et al 2010). These mice SNP profiles are a rich resource for mapping of complex traits and have been widely used for GWAS mapping (Liu et al 2007).

[0347] To avoid potential false associations due to the genetic-relatedness among strains, a novel bioinformatics tool based on Efficient Mixed-Model Association (EMMA) was used. EMMA is a statistical test for model organism-association mapping that corrects the confounding effect from population structure and genetic relatedness (Kang et al., 2008). Another way to avoid false associations due to population structure is to choose mouse strains from different phylogenetic origins (Clarke et al., 2011).

[0348] 4,000,000 SNPs/strain were used to allow good coverage of the genome. FIGS. 4A-B shows a Manhattan plot indicating the log of the odds of association of the markers in each chromosome. The GWAS analysis identified Grin2b (p value=6.58E⁻⁰⁸), the gene encoding for the subunit B of the NMDA glutamate receptor (NMDAR2B or NR2B), as a potential modifier gene of GD progression. Specifically, a single nucleotide variation was identified (SNP ID rs29869040) on chromosome 6 (Chr. position 136080931), in a non-coding sequence of the Grin2b gene (located in the intron region of Grin2b mRNA), where guanine correlated with CBE-sensitivity and a phenotype of early GD, while adenine correlated with relative CBE-insensitivity and more moderate phenotypes of GD (association p value=1.73×10⁻¹⁰).

[0349] The average survival time and Grin2b SNP variation of the 15 mice strains tested are summarized in Table 2 below.

TABLE 2

| SNP ID | Average survival | |
|---|---|---|
| rs29869040 | time (days) | Mouse strain |
| G | 23 | A/J |
| G | 24 | AKR/J |
| G | 24 | C3H/HeJ |
| G | 26 | DBA/2J |
| G | 29 | C57BL6/JolaHsd |
| G | 30 | MRL/MpJ |
| G | 38 | WSB/EiJ |
| G | 41 | MOLF/Ei |
| A | 84 | NZW/LacJ |
| A | 106 | FVB/NJ |
| A | 108 | 129S1/SvImJ |
| G | 119 | PWD/Ph |
| A | 130 | BALB/cJ |
| A | 143 | KK/HlJ |
| A | 199 | BTBR T^{+ITPR3TF/J} |

[0350] Based on the predictive studies described above, the involvement of Grin2b in the pathogenesis of neuropathic GD was evaluated. The significant associated SNP was found in intron. Since non-coding SNPs can regulate the expression of quantitative trait locus (QTL), the mRNA levels of Grin2b were determined by qPCR. The samples used were taken from cerebral cortex because Grin2b is expressed in the brain and this area demonstrated the pathology. The transcript levels was determined in 2 short living (A/J and C57BL6/JolaHsd) and 2 long living strains (NZW and FVB) 10 days following PBS or CBE treatment. Different pattern of gene expression was found—Grin2b expression levels were increased only in the short-living strains following CBE-treatments, indicating a regulation of the expression levels under stress conditions (FIG. 5A).

[0351] Furthermore, the levels of NR2B protein in postmortem biopsies of a pathogenic brain area, frontal cortex, in controls, Type 1 and 2 GD patients were evaluated by western blot. Analogously to the qPCR results obtained in the mice tissues, no changes in the levels of NR2B in the tissues of Type 1 GD patients was detected, while elevated levels in the neuropathic patient were observed, suggesting that NR2B plays a pathological role in nGD (FIG. 5B).

[0352] In the past, one of the inventors of the present invention have shown that GlcCer accumulation induces changes in functional calcium stores (Korkotian et al., 1999, Pelled at al., 2005). In addition, the Inventors demonstrated that rat hippocampal neurons treated with CBE are more sensitive to the toxic effects of high concentrations of glutamate in vitro (Pelled at al., 2000), suggesting hyper-activation of glutamate receptors. Altogether, this suggests that the present GWAS analysis is likely to have revealed an important candidate gene that may be involved in the modification of GD pathological cascades; and that agonists of NMDA receptor in the long living strains should reduce their life spans and antagonists of the NMDA receptor should increase the life spans of the short living strains.

### Example 4. The Effect of NMDA Antagonist MK-801 vs. NMDA Agonist D-Cycloserine on nGD Progression

[0353] To study the biological relevance of glutamate excitotoxicity in neuropathic Gaucher Disease (GD), a pharmacological approach was used. First, the role of a potent NMDA antagonist, MK-801, in GD pathogenesis, was studied. MK-801 is one of the most specific NMDA blockers that exist. It binds the ion channel of the receptor in a non-competitive manner at several domains, preventing the influx of Ca²⁺ through the channel. MK-801 has been extensively studied for the treatment of animal models of neurological diseases (Lipton, 2006). However, it antagonizes both synaptic and extra-synaptic NMDA receptors (Parsons and Raymond, 2014).

[0354] FIG. 6 illustrates how blocking NMDA signaling with MK-801 (0.3 mg/Kg/day) extended the survival of CBE-treated (25 mg/Kg/day) C3H mice, suggesting that the NMDA receptor is a good therapeutic target for anti-GD agents.

[0355] On the contrary, a potent NMDA agonist, D-cycloserine, administered to 4 long living mouse strains (BALB/cJ, FVB/NJ, 129S1/SvImJ, and BTBR T⁺ Itpr3^{tf/J}) reduced the life spans of the CBE-treated mice (FIG. 7).

### Example 5. Examples for Other NMDA Antagonists for the Treatment of nGD

[0356] Despite the positive effects of MK-801 in extending the lifespan of GD mice, it cannot be used to treat patients due to its high affinity to the receptor and low off-rate kinetics, blocking not just the toxic effects of excessive calcium influx via extra-synaptic receptors, but also crucial normal functions of glutamate signaling (Lipton, 2004). Therefore, memantine, an uncompetitive, open-channel blocker that presents a faster off-rate binding kinetics to the receptor than MK-801 and preferentially blocks extra-synaptic NMDA receptors (Lipton, 2006, Parsons and Raymond, 2014), was tested. Memantine is less specific than MK-801. It acts as a non-competitive antagonist at the 5-HT₃ receptor and alpha-7 nAChR (Rammes et al., 2001; Aracava et al., 2005) and acts as an agonist to the dopamine D₂ receptor (Seeman et al., 2008). Memantine is approved by the U.S. FDA and the EMA for treatment of moderate-to-severe Alzheimer's disease (Reisberg et al., 2003) and dementia with Lewy bodies (Aarsland et al., 2009).

[0357] Several mouse strains [A/J (AJ), C3H/HeJ (C3H), DBA/2J (DBA) and C57BL6/JolaHsd (C57)] that develop neuropathic GD using CBE as shown in FIG. 1B and Table 2 above were treated with CBE (25 mg/kg day) or with CBE plus memantine (3 mg/kg day). As shown in FIG. 8A, in all tested strains treatment with memantine significantly extended the life span of the mice.

[0358] Memantine treatment at a higher dose of 30 mg/kg/day significantly extended survival of AJ mice even at a higher CBE treatment dose of 50 mg/kg/day (FIGS. 8B-C).

[0359] Treatment with memantine increased the life span of the neuropathic GD mice to a greater extent than MK-801, possibly because memantine blocks preferentially the extra-synaptic NMDA receptors while MK-801 blocks both the synaptic and extra-synaptic, NMDA receptors (Parsons and Raymond, 2014).

[0360] In a similar manner, treatment with memantine delayed the progression of the motor dysfunction induced by CBE, as assessed by the hanging wire test (FIG. 9A). At postnatal day 49, the memantine-treated mice presented the same score as CBE-treated mice at P21, suggesting that memantine is a potential drug to treat the most aggressive forms of nGD.

[0361] Importantly, treatment with memantine did not interfere with GBA1 inhibition in the brain, which was almost undetectable at postnatal day 70 (P70), the last stages of the mouse disease (FIG. 9B).

[0362] Since CBE can inhibit other enzymes besides GBA1, the effects of memantine were further evaluated in a genetic mouse model of nGD, where the GBA1 deletion occurs in neurons and astroglial cells. Remarkably, as shown in FIGS. 10A-B, memantine treatment significantly extended survival of nGD mice

[0363] In the last stage, another NMDA receptor antagonist, Ifenprodil, was tested in the CBE-treatment mouse model. In accordance with the other MK801 and memantine, this drug also showed increments in the life spans of the CBE-treated mice (FIG. 11).

[0364] Taken together, the data indicate that NMDA receptor antagonists may serve as a novel therapeutic target for nGD.

### REFERENCES (Other References are Cited Throughout the Application)

[0365] Aarsland D., Ballard C., Walker Z., Bostrom F., Alves G., Kossakowski K., Leroi, I. Pozo-Rodriguez F., Minthon L., Londos E., Memantine in patients with Parkinson's disease dementia or dementia with Lewy bodies: a double-blind, placebo-controlled, multicentre trial. Lancet, Neurology, 8, 613-618 (2009).
[0366] Aracava Y., Pereira E. F., Maelicke A., Albuquerque E. X. Memantine blocks alpha7* nicotinic acetylcholine receptors more potently than n-methyl-D-aspartate receptors in rat hippocampal neurons. J. Pharmacol. Exp. Ther., 312, 1195-1205 (2005).
[0367] Beavan M. S. and Schapira A. H. V., Glucocerebrosidase mutations and the pathogenesis of Parkinson disease. Annals of Medicine, 45, 511-521 (2013).
[0368] Bliss T. V. and Collingridge, G. L., A synaptic model of memory: Long-term potentiation in the hippocampus. Nature, 361, 31-39 (1993).
[0369] Caudle W. M., Zhang J., Glutamate, excitotoxicity, and programmed cell death in Parkinson disease. Exp. Neurol., 220, 230-233 (2009).
[0370] Clarke G. M. et al., Basic statistical analysis in genetic case-control studies. Nat. Protoc., 6, 121-133 (2011).
[0371] Cooke S. F. and Bliss T. V., Plasticity in the human central nervous system. Brain, 129, 1659-1673 (2006).
[0372] Costa J., Gomes C., de Carvalho M., Diagnosis, pathogenesis and therapeutic targets in amyotrophic lateral sclerosis. CNS Neurol. Disord. Drug Targets, 9, 764-778 (2010).
[0373] Cox T. M., Gaucher Disease: clinical profile and therapeutic developments. Biologics, 4, 299-313 (2010).
[0374] Deegan P. B. and Cox T. M., Imiglucerase in the treatment of Gaucher disease: a history and perspective. Drug Design, Development and Therapy, 6, 81-106 (2012).
[0375] Essa M. M., Braidy N., Vijayan K. R., Subash S., Guillemin G. J. Excitotoxicity in the pathogenesis of autism. Neurotox. Res., 23, 393-400 (2013).
[0376] Frazer K. A. et al., A sequence-based variation map of 8.27 million SNPs in inbred mouse strains. Nature, 448, 1050-1053 (2007).
[0377] Fuller M., Meikle P. J. and Hopwood J J., Epidemiology of lysosomal storage diseases: an overview. Fabry Disease: Perspectives from 5 Years of FOS (2006).
[0378] Gonzalez D. E et al., Enzyme replacement therapy with velaglucerase alfa in Gaucher disease: Results from a randomized, double-blind, multinational, Phase 3 study. Am. J. Hematol., 88, 166-171 (2013).
[0379] Hollak C. E. M., An evidence-based review of the potential benefits of taliglucerase alfa in the treatment of patients with Gaucher disease. Core Evidence, 7, 15-20 (2012).
[0380] Kang H. M. et al., Efficient control of population structure in model organism association mapping. Genetics, 178, 1709-1723 (2008).
[0381] Korkotian E., Schwarz A., Pelled D., Schwarzmann G., Segal M., Futerman A. H., Elevation of intracellular glucosylceramide levels results in an increase in endoplasmic reticulum density and in functional calcium stores in cultured neurons. J. Biol. Chem., 274, 21673-21678 (1999).
[0382] Kostandy B. B., The role of glutamate in neuronal ischemic injury: the role of spark in fire. Neurol. Sci., 33, 223-37 (2012).
[0383] Lipton S. A., Failures and successes of NMDA receptor antagonists: molecular basis for the use of open-channel blockers like memantine in the treatment of acute and chronic neurologic insults. NeuroRx., 1, 101-110 (2004).
[0384] Lipton S. A., Paradigm shift in neuroprotection by NMDA receptor blockade: memantine and beyond. Nat. Rev. Drug Discov., 5, 160-70 (2006).
[0385] Liu X. B. et al., Switching of NMDA receptor 2A and 2B subunits at thalamic and cortical synapses during early postnatal development. The Journal of Neuroscience, 24, 40, 8885-8895 (2004).
[0386] Machaczka M. et al., Substrate reduction therapy with miglustat for Type 1 Gaucher disease: A retrospective analysis from a single institution. Upsala Journal of Medical Sciences, 117, 28-34 (2012).
[0387] Mehta A., Prabhakar M., Kumar P., Deshmukh R., Sharma P. L., Excitotoxicity: bridge to various triggers in neurodegenerative disorders. Eur. J. Pharmacol., 698, 6-18 (2013).
[0388] Mumford R. A. et al., The Gaucher mouse. Biochem. Biophys. Res. Commun., 67, 1, 85-90 (1975).
[0389] Nicholls J. G., Martin A. R., Fuchs P. A., Brown D. A., Diamond M. E., Weisblat D., (2012). From neuron to brain (5th ed.). Sunderland, Mass.: Sinauer Associates.
[0390] Parsons M. P., Raymond L. A. Extrasynaptic NMDA receptor involvement in central nervous system disorders. Neuron, 82, 279-293 (2014).
[0391] Pelled D., Shogomori H., Futerman A. H., The increased sensitivity of neurons with elevated glucocerebroside to neurotoxic agents can be reversed by Imiglucerase. J. Inh. Met. Dis., 23, 175-184 (2000).
[0392] Pelled D., Trajkovic-Bodennec S., Lloyd-Evans E., Sidransky E., Schiffmann R., Futerman A. H. Enhanced calcium release in the acute neuropathic form of Gaucher Disease. Neurobiol. Dis., 18, 83-88 (2005).
[0393] Peters L. L. et al., The mouse as a model for human biology: a resource guide for complex trait analysis. Nat. Rev. Genet., 8, 58-69 (2007).
[0394] Rammes G., Rupprecht R., Ferrari U., Zieglgänsberger W., Parsons C. G., The N-methyl-D-aspartate receptor channel blockers memantine, MRZ 2/579 and other amino-alkyl-cyclohexanes antagonise 5-HT(3) receptor currents in cultured HEK-293 and N1E-115 cell systems in a non-competitive manner. Neurosci. Lett., 306, 81-84 (2001).
[0395] Ratjen F. and Doring G., Cystic fibrosis. Lancet, 361, 681-689 (2003).
[0396] Reisberg B., Doody R., Stöffler A., Schmitt F., Ferris S., Möbius H. J., Memantine Study Group. Memantine in moderate-to-severe Alzheimer's disease. New Engl. J. Med., 348, 1333-1341 (2003).
[0397] Seeman P., Caruso C., Lasaga M., Memantine agonist action at dopamine D2 High receptors. Synapse, 62, 149-153 (2008).
[0398] Sidransky E. et al., Multicenter Analysis of Glucocerebrosidase Mutations in Parkinson's Disease, N. Engl. J. Med. 361, 1651-1661 (2009).
[0399] Traynelis S. F., Wollmuth L. P., Mcbain C. J., Menniti F. S., Vance K. M., Ogden K. K., Hansen K. B., Yuan H., Myers S. J. and Dingledine R., Glutamate receptor ion channels: Structure, regulation, and function. Pharmacological Reviews, 62, 405-496 (2010).
[0400] Vitner et al., RIPK3 as a potential therapeutic target for Gaucher's disease. Nat. Med., 20, 2, 204-208 (2014).
[0401] Walker F. O., Huntington's disease. Lancet, 369, 218-228 (2007).
[0402] Zhang C. K. et al., Genome-wide association study of N370S homozygous Gaucher disease reveals the candidacy of CLN8 gene as a genetic modifier contributing to extreme phenotypic variation. Am. J. Hematol., 87, 4, 377-383 (2012).

1. (canceled)

2. A method for treating a neuropathic form of Gaucher Disease (GD) in a patient in need thereof, comprising administering a therapeutically effective amount of an NMDA receptor antagonist to said patient, thereby treating said neuropathic form of GD.

3-4. (canceled)

5. The method of claim 2, comprising administering to said patient a therapeutically effective amount of an agent selected from the group consisting of an enzyme replacement therapy agent, substrate reduction therapy agent and pharmacological chaperone therapy agent.

6. A kit identified for use in treating neuropathic form of Gaucher Disease (GD), comprising a packaging material packaging an NMDA receptor antagonist and an agent selected from the group consisting of an enzyme replacement therapy agent, substrate reduction therapy agent and pharmacological chaperone therapy agent.

7. The method of claim 2, wherein said NMDA receptor is an extra-synaptic NMDA receptor.

8. The method of claim 2, wherein said NMDA receptor comprises an NR2B subunit.

9. The method of claim 2, wherein said NMDA receptor antagonist is selected from the group consisting of memantine, nitromemantine, neramexane, ketamine, amantadine, dextromethorphan, L-687,384, amitriptyline, 1-benzyl-6′-methoxy-6′,7′-dihydrospiro[piperidine-4,4′-thieno[3.2-c]pyran], eliprodil, ifenprodil, orphenadrine, kynurenic acid, felbamate, and pharmaceutically acceptable salts, hydrates and pharmaceutically active enantiomers thereof.

10. The method of claim 2, wherein said NMDA receptor antagonist is selected from the group consisting of memantine, nitromemantine, neramexane, and pharmaceutically acceptable salts, hydrates and pharmaceutically active enantiomers thereof.

11. The method of claim 2, wherein said NMDA receptor antagonist is selected from the group consisting of memantine, eliprodil and ifenprodil or a pharmaceutically acceptable salt, hydrate or pharmaceutically active enantiomer thereof.

12. The method of claim 2, wherein said NMDA receptor antagonist is memantine (3,5-dimethyl-1-adamantanamine) or a pharmaceutically acceptable salt, hydrate or pharmaceutically active enantiomer thereof.

13. The method of claim 2, wherein said NMDA receptor antagonist also has serotonergic activity; and/or wherein said NMDA receptor antagonist is also a 5-HT₃ receptor antagonist.

14. (canceled)

15. The method of claim 2, wherein said NMDA receptor antagonist also has cholinergic activity; and/or wherein said NMDA receptor antagonist is also a nicotinic acetylcholine receptor (nAChR) antagonist, and/or wherein said NMDA receptor antagonist is selected from the group consisting of amantadine and dextromethorphan, and pharmaceutically acceptable salts, hydrates and pharmaceutically active enantiomers thereof.

16-17. (canceled)

18. The method of claim 2, wherein said NMDA receptor antagonist also has dopaminergic activity; and/or wherein said NMDA receptor antagonist is also a dopamine D₂ receptor agonist.

19. (canceled)

20. The method of claim 2, wherein said NMDA receptor antagonist is also a sigma-1 receptor agonist; and/or wherein said NMDA receptor antagonist is selected from the group consisting of L-687,384, amitriptyline and 1-benzyl-6′-methoxy-6′,7′-dihydrospiro[piperidine-4,4′-thieno[3.2-c]pyran], and pharmaceutically acceptable salts, hydrates and pharmaceutically active enantiomers thereof.

21. (canceled)

22. The method of claim 2, wherein said NMDA receptor antagonist has neuro-protective activity.

23. The method of claim 2, wherein said GD is sub-acute, chronic neuropathic GD Type 3.

24. The method of claim 23, wherein said GD Type 3 is GD Type 3a.

25. The method of claim 23, wherein said GD Type 3 is GD Type 3b.

26. The method of claim 2, wherein said NMDA receptor antagonist is formulated for oral delivery.

27. The method of claim 2, wherein said NMDA receptor antagonist is formulated for injection.

28-36. (canceled)

37. A method of treating a patient diagnosed with neuropathic form of Gaucher Disease (GD), the method comprising:
(a) determining in a biological sample of the patient a sequence variation that affects an amount of an expression product of a Grin2B gene and/or an amount of an expression product of a Grin2B gene; and wherein presence of said sequence variation and/or an amount of said expression product above a predetermined level and/or increased amount expression product relative to a biological sample of a healthy patient or a patient diagnosed with GD type I is indicated,
(b) treating said patient with a NMDA receptor antagonist,
thereby treating the patient diagnosed with neuropathic form of GD.

The application's sequence listing, which the Patent Office published only in electronic form, follows.

SEQUENCE LISTING (9 sequences)

SEQ ID NO: 1 - protein, 17 aa, Artificial Sequence
  Amino Acid sequence encoding a NMDA receptor antagonist
GEEELQENQELIREKSN

SEQ ID NO: 2 - DNA, 20 bp, Artificial Sequence
  Single strand DNA oligonucleotide
cgcccagatcctcgatttca

SEQ ID NO: 3 - DNA, 22 bp, Artificial Sequence
  Single strand DNA oligonucleotide
ctggaagaacatggaggactca

SEQ ID NO: 4 - DNA, 20 bp, Artificial Sequence
  Single strand DNA oligonucleotide
tgctgttggtgattgttggt

SEQ ID NO: 5 - DNA, 20 bp, Artificial Sequence
  Single strand DNA oligonucleotide
ctggcttgtgtgggaaagat

SEQ ID NO: 6 - DNA, 444666 bp, Homo sapiens
tcgattccaagtttaaattttatgtgtagaatttcctttacatagaggagctttgcagtatgtctatatctagccgtgtatgctggggataggcagaattagagaacgaggctgtaatcataaaatggtgcttccgttatgtccattcttcagctccaaatggaagaggaaagaggtcctggagttccaaagggtgactgtctgtgctgtgaatagttgtccatggtgagaggagagtgacaacaaacagctgccacatataatgggattagaagtaaataggaggcccgctttccccagatgcacatacatagtggttcacattctggctgtatattaaaatcacctgggcaagttttcaacccctaacccctccagccacccaggacaattgaatgagactctctaggggatgagactcaggcatcagcatttcagaaatactcagatgactccactatgtaaaactgagaactactgctccaggtaacctttgatggggagggcagatagaccaacatctgggtttcaagataagaaaacggaagtctagatgatttgatgcaggccacaaatgatagctttggcataatttttttgacaggccctgcagactctcagaaccacttttctggtggtctcttcccatcttcttggtcattccagaattccacaagaaatttctttcagaggatcatttatatttttgaaagaattagtttgcatttgtaaaagaataggggaatagaaatattcaaatcaagtgttcagggtaggttctaccttcctagtgatgtatgcaggggaagagtgtcaatcctgggacagccaaggaggctcatctttccggaacagttggctgatggggacacaaccgggtgctccctcagcctttcattagactggtcttactgatagtcccttgcagtggacttcagggtggcacaagggcatgtaggacacaggtgctctgagctaatccatttaagagattccaggtgtgggtgaggcaggctgtataaagaacagacacttggcatagtctcaggaagttctggcactcacccttgtcattggagtctttgttttattgaaggtgttgtgatcatgatcaaagctttcatgatatcctactggaggttcccaccataatccagataaatactcgcaagcttccttatttaaaactagagccaagatgggcacagtggctcacacctgtaatcctagcatcataggaagccgaggcaggcagatcacttgaacccaggagttcagaatcagcctggacaacatggtgaaaccccgtctctacaaaaaatacaaaatcagcccagtgtggtggtatgcaccagtagtacccagctacacaggaggcggaggtggtagaatcacttgagcctgggaggtcaaggctgcagtgagccgtaatcatacctctccactccagcctggatgacagagcaagaccctcttaaaaaacaaacaaacaaaaaaaaaacaaacaaaaaaacaaaaacaacagaaaaatcagagccaagatttcaagtcttgtcttcccccttttttttttaaacaaatctcagattttcaaatcaaacttactgtataattttcagattattgttaaagcagttctgttgtccaaaaaaaatttggggtttaaggaagtatctccagaagtaaagagaatcactatatctgggaagaatctggctttatgttagagcttgctactttctggaatgttcagggagaaacaagaatttttgttcagtacaaaggaaagtacaagagagaccctcacagataatctctctgagacagtaacttcaaagagataacaatacattatcctgggagattcctggaactagggattagccctgctggcttctagccagggctgccatacatgagctcacccaggctccttggccatgagacagagttcttctaaatggtctctagaaggtcctttccagtactaggactataggaggagcatgtggcttttaataaagtgatgttgaaatgtgcctcatgattggcatgtgaaaagctaaatatgtctatgctattttcttaccaagatagctaagggggagatactattatttaacttggataatttagcaatcaaggtatagaaagagagatcatttagaatccatatataaagccagtaacaggactgggactgggagtggggtgggaaacaatcagcaaaacaagggctggtttgcttttctgacacctccaagcaatggaagtatgcattaaagagtaaaacaattaccaatttacattgtcttcattaatattgggaagaaccagcaaaatccaactgtgggaacctctaaaggataaagtgctctattcctttaacaagtatatgtcaagaaaaagttagaaagcaaatctttagatttaaaatacatttgagaaatagcaactaattgtatggaccttatgacttatgggaaaaaaacccaccaccaccccataaaacagtattacatttgagacaattagtgaacactggatatttcttatcaaggaattatggctaccttatgatgtcacaatggtattgttaaactaaaaaagagtccttagtaaaagagatatatactgtaatgtttacagatgaaaccatataattatgggatttgtttcagaataatacatgagggggagatgagtgtaaccaagggctccagcaccagctatagtagaaacagatcccaacccaagtagattcgccagtccaagactcctaccaacaattggaaaccaactgggcaaggggtttttcccaaacagcacttttaacaatctttttggaatcacagtaaagaaagcacaaagaccaagaaaaaaactctgattctggattttttttaaccctgataatttgtggtaggtttctttattttttgaatataaagtgacagaaataatttgccattagaaaagagaaagaatctttgactatttacagcttttatacatcacaaagtttttcttgtttttttatgttgtcttttttttaattcgttttaatttttgttcctgcatcatttgaacaagtccaaactggaaatctatacagctcacaaaaaagccctccacccaaaagaccccccacccccacccgaccccaatgagaaacaagataaatcaaaagaatgaaatcaacttatttcttttgtttaaaggtaagtcatttgcttatatatatacttgtaattatttttttcaagttcaaacaccaaaatccaagagagaaaggaaaaaataaaaagacccagtcatccgcccctccccccactccagaatctcaattgatccctgcatgtccaaaataagaaatagatatttacagaaaacagaagcaaaacaaataaacaaaaaaagaacttggaggtggatgggctggggatctgagagtcaagaggaaggagagccggccccagggaggagtgtggagtctgggcctcgcagagctgaggcaagcctgagtcgtcggtgctccctggagaggacatcacacaggaaagctatgaccatttcccctctgccatgtgactttgggaggggtgcagctgtgaatttgcaacgcaaccccatagtggatgcatatcatgtttccatcatcacccccttacacacgtgcgctcacacacacgctcacacacatgtgcacaggcacacacacgcatcagtcattgtggctaagtgtaattctgatgctgttggagcactggctcctgtcacgtggaggaaaagagatttcccctagggacaagagctcactgccccatcccttctctgatctccactgtaacattgcctctagctcccttgaaatgtttccacaagcgtcagggctactctgaagtattaatgctgggatagtcactgggtaacaaagctcccataaatctattccctctgctccaacaattttgcccctcacttcccacaaattcctttaacaaataggcgtacccaggttaccccattaaccaggggtgggagccagtctgaaggaggggagatctgaggcagggtaaatggaagtcacattgttttctgcacatcttccaaagagtggattccgggaggtcagaaagcaaagagaggtcatgacaaaaccatccctggcttcctttgcttccctcttccttcctaaatagagtttaatgcgtactcagtgcataaagtaaggtatgactgagttggctgtgataccttaagaactcaagatgtggcgttagatgagccaagatgaacataatttaatcttttgggggaaaacggctggcaggatatgaccatgctgaagggtttgcctttattagtggacagagaggctgaaccagcagcagcagtagttgtgatctcattcacaccctgttcagggttccgtgagggtttggaaaaatagttcactagaaatggcctaacagtttctcttctcaaattatgattttttcaggtggcacaggaaatagaattagtgcatcctctgtgtcagaaacaacgtgcagtgtctctgggggcagactctaggttgctcttgctaaatctccaaatgcctacacagtggaattttatttttctgctctccttgccaaactacttgtttttttcagaccctccccaagagtcctcacttacccccttttcatgcagccccactcagagtccttttctttctaagccctctcctgatccttgaaaacgctctctcaaggcttttaaagactttcattcatttccatgctcctgtcccactgtttctgtcacaaaagaaaatacaaaatcaaaatgatctgtcagagaaaactttcatttagcagaattgggcagaagcaaagttgctttccaatcctttttatttgattttttttttaaagatgaacaaggagtaaggtaagtaagaacaaataattatgacccccccacaacgagactagcttagttgggaaccttagaaaggacaagatttcctgtgaaaatgtgtactttccaggataaatagtcaaaatgtggtctcaatccaggataacatttgttgacatctataaaaacatgttgtggcctatcacagttagcagtggggtttttagtagaagttaaaaaagcaaatatcaggactgaggaagaggtaccagagttccatgtgctgccatcaagtccctgccccgggcacttgcagcatcaccacctcaatctgacatagagacaattagggccaaccccaaatgcccacagcctcgcttagggcaatcaccacgagaagcccaagacccccagtccctcttatcacttggactttcatccccagatacccatgcacatctcccatctcagctcatttcccttcctttaccaactcccaaatcctgcctaagaatcagtggttcatcaccagccacaaccctggcaattcctttcctcttgctcttacagaaacctggctcctctttgaggaccctgaatcactcccaggtggtgagcatttccacttgcaccttcctcatgccctggggcctggaggtggagatgcccttcttgcccctcattgccattccagaccatcctccctcctttttaaaaaaaaataacatgcaacaaccataaaatccagctttgatgcacatcagactaggctagctgcaccccttacttgatgcaatgattgaaatgttctcgaatcactctccctcattcctgtcataatttacattcctatcatatggaagtcaacattttgttgacttcaatatctatataattcccatatcctggcctctcagttccttgacccctgctccttctataaccttttcctctatcttatctcagcccaccaccccaacaacagaccccaaaccaccaataactgcaagccctccataacctcaagcatccacctctccaacccacctcctaatttctacgttattgcttctgactcactaactgagtgatcccagcttgaatctcaatcctctgcctctaatatgcttcattgttcctccttccctaaaaatcctcactttcctctacacccagcttagattccatgaccaaacattatagttaacacactgcagttgcccttgactccacatctcttgctttcattatattcacctggttataccccaaccctgttccaatctaacttgccaccctgtttaagcagctgaaggtgactgaagaaaacaaatttctttaaactcataatcataaaaactcaaataattcctttatgccccctagcatgtctcctatatttttggtgtctccgacatttttgttctcactcttcctgccggatggctatatgactcattcatgctttcttccttccaaaacctccaatactcttcccctatactcactcttaactgatgaactcctttcatagtttactaaaaatcaatcagaaaaagcatactcccattatcccatttaccagcccacttgcatctgtgcccaaatgcactatctccctgctattaatacaaacaaacctggttagtcccctgaagccagtccctctatgtttgtattgaatcccatgccctctcacttcatcaaagacattactccagcaattgtcctctctccctaggcatcatcaatttttcctttctcctggattagtcttgtcaacataaaatgggctgttatttttcccatcttaaaaaaagaagtccctccctgggcgtcacattctctatgatctgctatttccatgtcctctttacagccaaactcctaaagcgttgcctattcctgttgtctctacctcctctccttcccctctttcttgaatccaccccatcatgcttttgcccccaccagtccactgaaacagctctcttccaggtcatcaatgggatgacctccatgtttccagatagtcttatcctactcaataatagtacttgctttacccattaaccactcctcccattgctggtcccttctcatctcctggagctttgaacaatcctccaccctgggcctcagtctagagaatcctcttctgtcgctactcattctctagttccagtatcatggcttcaaataccaaccaaacgcatacaaattttaaatatgtatcttcaggctatacattttccctgaactccaggtccatatatctaattgcctaatcatcatttctacttgcaacatctgtagacaccttaaactataaggctttccttcccagtcagcctcacctgcaggattcctgtcttacactgatggcaactccaaactttcaatagctcaggccaaacattctaaggttattcttaagatttttctttctcttattcaatgtctaattcatcagcaaactgtgtgatatcgattctttaaaacatttctggaatccaactgcttcttatcacctcccctgctaacatcatggcccaagcaactatgatctcttaccaggattattgcaagagcttcctaaccggtctttcagccgcttccattgtctgccctctcagggtatactctcaacacagcagtcccaaagcttcctcttcaactgaagtcagatcatatcactctatgctccgaaccttctagcaacttctcatcttgctcttggtaaaagccaaatcctgacagtgtcctacaaggccctacctgacttgcgttattgccccctctctgacctcacctctcatactctcctcctccctcattggcctcccggctcttcctcaagtttgccaagcatttggtttgacagcagggcctttgcaattgctttctctttgcctttgcatagaaagccccaagtctcactccctcatttcctccaaacctttacttaaatgtcatctttgcttactcaaaaatagcaaccccacacccatcctatcatctatcccccttaatctgcctcatttttctgcatgacactttgcactatctgacatgagatctattgatttgcttttttgtccatttcctctcatcaacatacaaacttcaagagggtatggactttgtgtggttcgttcttatattccagcacctagaacagcctggcatgggtttccactcaataaatatcaacatggataagtcatttatccaaaacatgctctgaagccacagaccaaatatccccaaaataagagctccagtaaacaaaacaatgcaagcaaggaaacaactcctcccccaaaacctggatatttattctaagtgtttctaaattttaaccaatggcaagtgcagagctcacttttcatgatttttctggtttgagaattgtccttgggttaattattatttttaataggtaagaaaaaagttactccgagtttcattaatctatggcactttgtccctcctctcccctgcggcctaactcccaaatccccttcagctatagtgaaatacacagacgctgaatatttgggaggattacttaacgttttagctttcctggtttgcttagaacatatgatctactacccgccagtaatattttatagcttagaagatcatgtctgagtcagtaaattccatgttaatatgtgtaagactcaggattaaatcaatctgtaaaatgcctatttgtaatcgaatctagcaattttctttctgaagtaaacagtaatcacattaacaacctagtgatttcactggagatgggaagatataattttatttaacagattttctctctcagaggtgacctaactttgtgatccaaaatcattccaatattgaaaaaaaaaggttcagctaactccattcccctgatatattcagttctcagtgccccttggcttcccaatttaagtcaatgtaatcacaatgcacacaaggctcttccactcagaatcttcttgactggagaatggaaatcattggagaggggctgccctaaaggtttgtagacaaggttttgaagaatcgagctacaatgcttatcaatgtctgtctggaagaaagcctacgtctctttctaaagccagcctgtcaccatttctgagccatcaatggcagcacagcctctccttctgccagagctcacagggaatgacaaatctctgagggaatacaccagagcatctggatgtgggtgtcatcgtctcttcaccaccaaaccattctaccccaatttccctcttctttgtttctagattatttttttttcaactcagtgaagaacatttctcagaaccaagctttttgtctgcttgtcactgaatctatttcccattcaaccttctgtttctcattccaatagacacacaatattaatggttaaaaataacatgcaacaactcactgggcgagaaatttagaaacacttgcctcctatgaacccagggccaaggggagctgaggatagtgtcacattaccagcatgttcaagctagacatcctccatcacaaagggcttgtgccttgaaataaatttaaaaagagagaacaagaaaagccacaaaatacctccacatacacaacaggcatcttgaccagagcaccaggacacatgctcagaggtggcttaatattccagagcacatccctctccactaagagccactcactatcccagcacttgatcttgagttgaagcactcaggaacaagacctcatttgcctgcttgtcattctttctccaacttcctaagttaaaaaatgatgagaaaaccatgaaaaattactgtcaagggtttcttttaacagtctgatagtttagataagaatacagtttaagggatatatcccattttcataggaaaggaaagtcggggaggggagccaaaaacatgaaggggaaccaggagagctgccaggaggctgggaggtgaggaagggtttccaagtaaggagcttggaaggttgttctcaacgataaaacccactttgcagtggctaaaaatataagtattttggtctattttatattatagctgtctttccttttgtgaagcaccaaccactgaagttcattttggaatcatggccacccagaagaggaaaggggtgatcatgtgtctcaaagaagagataactttgagggagaggatgaaaactgcaaagacccttgggattaaatgaaatctgctgattctactcttttttcatgaatttctgtatgatatttagcaattagaatgtttgactggcaatggccaggtagatttcaccattatgtaacaaagagaataaaaaagaaaggaaaggagaaaacaataattggcctaggagatgggagttttgttcttggtcttagttgtctccctaggagaagcagctcttttccatccaaaggtgaacagaagactctgcagagcataatgttgctatggcttgttttactgaagtaaagacactgtaaatctcaaaaatactccaacttccctgattcttttggaagttattgggcatctgcattttcccaggagacttctctccacattgtcgcagtgttgaaactctgagataagaattccttgcccatcttctaacttccacccagatatctggcttctgtcaataggccttacccaaacagggttatgtatatgtatgtatgtatgtatgtgtgtgtatatatatatatatatatatattttttttttttttctgaaagctacagaagagaccacggagatgtgtgagctgccaaggtgccaatgatcaaatagagaagtctagcttggaaataaatcaaaaccatcagaggaattacattccacccctaggctcagtgggaaagagtttaagttcatgtggatcttgctgttccggagcaagctctgggctctaaaattgagcttatcttctctgtctttcataggatagctaagcacccatgccccctaagggatacttgaaataggaagatatctttatgttgtgtatactcggtttagtggcttcagtcttgtgcagatatagattttctttgtaagacttcctccattggccgctatggtacagctcagaaaagctgaacttttcatttctattttaatatttaatactaagtacaagagctctgtggtttcaatcaaataattctccattcatgccctcagagtccccaagaatcctgctattttcccacctcccccccccgatgaatataggtgtagcagaagacagggagtggtcatcttgggggaataagatgctccaaatactcatcagctgttggccctgtgacctgtttttcaggatcatcatgatccaggtatctgtaatgacactcatgaaaaagatgaagtcaccacggagtcaaggtagaaatagctactgcccctctctcttagcttactatgataacacgattttatgtgaattattgggaggcaaaaggacaagggaaaaatgagatttgtaataggcttgattttttttagattaaaaaattagtctagtgcccacctcctccccccatcttcatgcatgggaataaaagctacctcctccatttcctccgatcatctgaaactagcctcctgaaccaggctccggggatcagtacactctgaagttgatggtatagaagtctcctcactcattcatctaaggacttttccatcttcctacctcctctcctatcttccctctagggctaggaaggactgataaaaaaaaaaagttactctacattaagcaggacactagagctctttcactgtttttggtttaagcataatgctgtgagccaaaatttcttctgcagcccaaactaaagatactaaaatctttggaaagatggattatatcctgagcttgatatcattcataagtgaacaggtgggttgtaagagaaggttgttgcaagattctctgatctgcgggtgcttaataaataattcaccattgcaaccttgtgacaaaatcaaggtctcataagtattctcaggagactattaattttggagcccccatgcttccctttcttcaggattttggcaggcagtaattatttattatcggtctgggggctataggttctttcttcaagaattcattgtgtatgtgaactgccttatatttttctgttcagaactaacttatgccttaatcctagaatcaggcttgtatgtttgaacttaattagacagaggtgcccagaaaaggatgtaaggggctctcccttgaggctgccctgctcactgtgggctgaccaaaactactgacaccttcggagtatcatgacacccctgcacacgttcctgaaggctcttttgccatgtagcactctggaagaaatcctctgtcccagtttattcttgagttttttatttatgtggattacatgctacctaaaaaaaatttttaataataaaaaattattcacaatatcttaccctatagaattcaaaaacatttttatttgaccaagttttcttcaccgtggaaacctctctaacctttctgattttcaaatttttgctttcttcttgctctttttgacttgtctctgtagatgtatgtggagtgtgtgtgtgtctacaaagggaaatttcatagataagatctggctaaatcagctgcctagatttcgtgacttttctccactgctagatgctgaaaacctacagtgggggcagacaattcaggcagcattactcgctgagctagactgagagttagaaatttggacaagttttggttcagccaagttttggttctgtcaagaattttctgtataatcttacttttggctaattatccaattttgtgctttgacttctcatctgtaaaactgaaagatgatcttatttccaagtcaaaggaggttatttggagaagtggttatggtaaattcttctgtattcacataccaactactgtgatttactcagaatgtaccataggctaagtgtggtggagcctaatgggttgctggttatcctagaaactccaccattccccaaggaggggagcagaggcaggctagaactgcaggagctcagtgcctctttacatgggaataagctaaaaatgctcgagaaatgactcttcagatttctatgtgacccatttctcgtgcctgttaccaagaaataaccaaagtgaatgcgctgatcactgaaggtgtgcaagagtctcaggaggaattctgtcataaagaatatgtatgtatctaagcaacaggactgtctgttctcagtagaatgacttctgcttctccatcctcttagaaccaacccatcaacaggaccttatggattccatcaggtcaaataggacagttagcaggataactatgttgctctaccacaaagaaaatgctgccttcacataaagcctcttttctgtaatccaagatgtccagctatgtacagcaggccccatcctagtcattaaaatgcagtgggattgactgtgctagactgattgggctcgagtttggaaacattaagtaccatgcacgtgttcgagctctgtgctcactcaacttctcatcctaacattgtttgtgttttgaggatgggctgctcagagtcaactcaggataagtatacctcaagatgaataaattgagaaagagaagtaaagaatgcaagagatgaaaagttagtgaagggaaacacagctgtaagtgccctcattgacttctaaatgcatttatatcaaagaaagggtgattttactacttcatgtttttctcagtaagagttccacctccacctagatgcttcactatcctccttgcttcctgcctatgtgaaaccttgatatttttcttgctcctgaccctgggagagagagaacagataaattattgaatccgtgaaggcatttatccctattccttgagaatagggattctcaaggaattctcctacccttattcctcccattgagaacagacctctccacctctgctcatgatgtttccaagaagagatgtgggcacatgtgcgaatatgtatgtatctaagcaacaggactgtctgttctcagggggactggcttctgcttctccatcctcttagtaccagtccatcaacaggaccttagaaggccacatggattccatagggtaaaatgggaaaatggagacgataactaggttgtttcatcacaaagaacatgctgccttcacatgaagcctgaatatttctgtcaaaccttgagggatcaatgatccacaagccaggtagagcaaagagaaaacactggctgcataaattatgatatgtctctttatcccattctaaatgaacactttcatctaccataacatgattgacataggaaatttggatctatttgttaagattgtgtgtgtgcattagggaggtacataggcatcagaatgctcatggcaaagagatcaaattctgtgtagttgtgctgttcaggtgaatatctgagagcaaagtataaactactgagagtataactcagccagaggcaacctaatggccaggtctctggtttgcagagggttcttatgtcatggtcaaagggagcattaaaatagccatggatttcaaaagaaaatcaattacaattaaaatgtgacaatgacagttaactgcaagactgttctgaatagggctgaagttttaggcaggcatgttttgtttcatttcgaaaaaaaaacaatcccctctggaaacaggtaatatacttatcctagaggagcaggcagctcaacaaattcgcattcctgtggccccttcccctgatgctgttctcctgtcagatttcagagactatgaatctcttactgcaagggggacagatggagtcacagcctggtggcctaaattctgtgggtaagggtggtgtgataagtcactccctctgcccagggtgatgatcaagggctccttgggtgctgtaatctgaaggacctgggcaggaatgacatggggccaggttccttgtggatatcaggacctcacacataaggttgcattcaggttcctcactcatctccgctttggtccttgctctttcaagtttccctactttccgaagctatcattgaagccagtaaccaagggggaaccatgtgcctcacatgtcagcttctggctttattggtgacacaaaaggaagctccagtgtagacttcctgttcttttccttcctcatatcctccctttccttttatgggtatttgtaggcaaaataattgacatgaacagttcatggctaaaatgcctagaattttggtccatttattggcccaaatgagattcatgaacgtccttcatgaggatggctgtcttcctaccctcccaccagctgtttaccagataatttgtttcatcagctaaaaaaaaaagtctcatagtataatgaaatgggttttgctctaaaatattaactattctcattttcaggagcaaggctatctagaccccataggacttttgaaaagcaaaattatctctctagacttatattttaattttcactaggtatctcccaagttgtcacaagttttgccctaccttgccaataataattgtcctacccactcctgtctcaatgaagagtggactttcttcactttttttttaaaaaaagagacttgtcactgcctgtaacttatttgagttcagttctctatagtatgctttaaattagcacacagtggcagaagatgcctcccaaaggggaataattcatagccaatggcataatgagatttacagagaaggctggccgggagaaggaacgaaaacattatcggttaccagagcagctgaagtgaaaggacagtacgagctccaagagtttcttcagagggacagagactgacactggctagaaagaatgattgatagattgctaagtagagccaagagaggaggaggaagggttaacagggcttcaagaatacagggaccagaggataagggagggccataaggtcagaagtgatgttgtctccccctgaggtaatgaatccctttatatttacagagaaaggagtagtttagagactagcattctctctgagccagctcattcaaatcctaacttactttcattgtaaatatacagataagaggtaaagtgctcaattacctcaactcttatcctccctttgggagaagtgatcctgtagacaaagcctcagaaagggtgagaagccaaagaactcaggaaagaaatataaagacaaggtggtgaccagcacagacagttcccccaaggccacaaatgtggaagtagcgtgtggtgaaatacagtggtcctgttggaccaccacctggggtctacaaggctgtgtgattagtgagccagaactgtgacaaggttcttttggtgctgaaagtgttaaaaaagaagctaaatattggatcacagatcagtcccagcatggatcaggttattagagactcaatcttggtagtaaagtgtctggatacaagctctacccaaagcatctgaaaagctgatacctaaaatttgatcaatatccttcatagtttctccctctgtcacttacttgaacacatgtagtgttccaagtacactttcctaaccataaaacagtccaaaacaacttcaaaggacaaagcacttagaaaaaggacaaagcacttagaaaaatccagattccatttgaaataatgaactgtatacatgtagtatatacatgtgattgtgtgtgcagatatatatagagaaactggggggattcatccttaggtgctactgcagatacaaatgggcaaaataaagtgactccttctcaattataatttataataatatcaaatatttactaatgcctttcatatacaaggcactctgtttagtgctacaggagataaaaagatttaaaaatacatggccctgaacacagggagcttatgctgtagcaggagagatgagatgtataaccaaatacctatgaaataagatggcccatgatagctgccactagggagaaacaacgaaagtgttatgggcattcataaaatgcctaaaattattttctgaatggaagataaagaagttgttctggtctttgaagacttatatagagggaatggatattattcaagaagggagtgagatgggagataggaaggagagtattttggacaaagggaacagtttaagggaagacgcaagtgggaaaacaagctggtagggaaaggtgaaacaaatgttattcagcttgtctggattatgggacacacacatagtcaagtaacaagaaattattgctggcagactacggcaagtgaagcccactgaaggttgtttcttgatctgaagaatgacatctgatttatatgtaggaagtgagtactgacaagagtagattcaaatataaaatattggaacaatgctaaaagacgctgaaataatccagactagaaggaagggtctgaatgaaaaggaaagactggaaaccttagggggaagaattagtaggcttttcaaatttttagatatgcaggatgaagaaaatggaggaggcaaaagtgcctgaaaagcttgagttcggtgacggaagacatggtgataccattaagcaaaaggaggaagttggtgattatgttggtttgcagcaatggttttggatatttgagtcaagatgaagttgagtgttcagaaggtgactggaagtatgtgtatgaaggaaaagcaaaaggtaggggctaaaagtgaagatttgggattcatcttcattcaaagagttattgaaatcatagaagacagaaagattgctacagaagcattaagataaggagaagagggtcaagctcagatataccatggcaagtcaatgctaaggagataagaggaagagcaggaaccaatgaggttagaggaccagagaactaagattaaaaccagaatgtattgcctcccaatggtaattgtcaatgaggttgaagagcagggtaagtaaagaaaaaaggctattgacttttgtaacaagaacttcattggaacgttgcctgagagtagtttcagaagagtggtagggtgtagcccattgatgaagccatgagcataaggtgaggaagtggagaaagaaagactacccttttgagaagttgggaagtgaaaagatagcgataggacagaaattcaagagtcaaattggattgagagatttgtctttagagatagttgtaggacgggtgtttttgagatagttgcaggtagatgtgtggaaggaattaaagatgcaaaagagagaaatacaattggctggagagcacctcagaagaggtcagagcatagggaagaggagcacttggttgggagaaaggatggaaaagatgtgtgaaagacaagagaaatctaaaggcagagaggacagcatatgtgaggattcaataatcagattttcttgcaaacacagtaggaaagattgcctgttgaaagacaggacatgaacatgaaaggaaaataaaacaaatttatcaagcacagaatgtgacactgagtcaacattggagaaattaaaaagtccaagtgagtaggcttcaggtgaggttaaattgattgaatttgtgctcttcacgtaggtttaagacttgctcttcttggggatgcaatgaatgacaaggggatgggatgcagttagctaagcatggttggtgtagtgagatggcaagaggaaaaaggaattgccggtgagaatattgctaatgtgggtaaatacagggttagaccaaagagggaattcaatgaggcctgatggatttatggaccagaacaacagaggggtcttgaaggaaggaagatatagaaaaggcaaggttgtggttagagaggaaatcccagagttttagctctgggaggtgtaataatttcaaaagaataagtccaggcctggccatgacatgggaagctgaatctctgcaatgttttttcaaatagcataatggatatctttgactcctaccctgaaaccagaaaatattaaacttgcatgtataatcatacaaatgtatgcatacctatttatacatacatttacatattttatacttatgctttcatatattctacgtgagtacaatatactccattttgaaaccttttatatcattcacagaactagcctagggacatagtacgtgcacaatagacgttggtttaattaaactcacatatttaaccagagagcttttatttttttctcctgcatagtactagaatctgctccacctcctaaatcacaacattaaaataattaccgataaaagagttcaggtttaaagtgtggaaacctaatctttaaaataacagtttaaattgggcttagtgttgtgctttttaattgtaccttaattcttgcactgagttctttcaccttctccaaaacacagattctacacaccagagtgccaaggctctgaggaattctactcatctactctgcttttcaccttcagttctttcaggagcccttaaccacataatcaccccagcaattatattcaaagcatgaagcagctccagaaactcactgtacagagctcttgagagatgtagagagaaatgtggaagatttctaactttccctacttattcccagtactgctattctaacccattactctgaacaaaattcttttttcttgcttcaatattgtaaatgagaagccctaaacgtcacagttctctccaaggcatgaaagtagcagcactggctttcaatttaaggttttgggtgagggcctttgtcataggaatagataggctatctcttctaagtcatagagctcacagggccactgtgtgactgaatcaatgtggttggaatgagttgagggtgggatgttctcagatatcctatgattttatacaatactgcaaccccaccccccaaactagaatagaatcctagattcagatcaatattagacattctcagactgactaatctgccattttagtgtcatcccaaacatctgctaggcctaagaaacaattgccccccaggttaagtagcacctgaggtcataagtggctcttttaccagataacagggcaccccctatggaggtggaaagtataggatatagaccaactcagctaattggaagattaattaaactgggacagaaaccagacaatgacagtaaattttattgtatcactaattcaatttgatttttctagctgcctactcagtaacatgtaatggaggagaagcatcactcttctattttctatggaaagaatcatagttctcaacctgccctacaagatactgaatttagaaattcataaattatacactcatatgattgtgtattgaaaataattcctaaccaggagtcctatttaggtgtcaaatgaggcttaaataaaagcaggcggaggccaaaatatggtttaaatgtctttgccatctagaacctgtatccttgttccctactctattgctctcagtgctctctgctcccttcctcttctcttgtatcataacttattcccaggaaaaggagtgagattcctaatgtaaattaggtgattaaatgtatacatccctaatatggcttaatatgtcacctttcctgggattactttcattcgaatgacagacagctcagctcagtgctaaagcaacaaatctgtgtgggaaggtggtagttgcagtggggtgggaaatgaaaaagaccttttcaggaccttcaacacaccatggaccacatagcatacataaggccagacccatcccagtgtgactattcactttcagctgcttctcctccatgaagagctccttaaacaggaggaaaagtctctgacacccaagtgaagaaagcaaaagctctgctgtagtgtgtagcagcctactgagcatgtatttcctatatggctttgggctcagagagcacataaggtatggccacagtccctggaaatgctgaatgcattcatcaatatcactgcagtgacatcatttatgcacacatctgaatcattcctaacatacaaaaacagacattcacagggtgtcaagcaatgacagggcctttttagagagatgatgattgaaagaataaagtgagttctggaatagtttttccaaaagcttattgcccaaacaatctggttattctatctgtaaatcttgaactaactaactaaaaaccgaccaaaaaaaaaaaaaaaatgaaccaaagaaacctagttcttagtgacatgtgcaggtgaccagcactctgcagagaattctcccttgggcaactcctgatggccacggaagaccgggtgagtgatagtcacttaactgtatagacaactcctactgtatcatgtcatacatgcgtttttggcactactgacaccagcaacatttaatggaatcatttgggattttcccctcaatcacaacatggctgtggccagtgcagggaaatacatatgaaggatgtttcccaagttctggctgaggatacacagtgacagattttgaaataacaaagtccactgtacatgcatcactttgaagggtgtgcaaagtctcgactcaggcaaattcaagggtcagattattgtcagtggaaatgctgagatttaagcattgccactgaaaggagttcatacaggaccacactcaccaaccacttctgcaatggaagggaatgatagagggtacaaagcgagaaagcatggattctgaagaacatgggaatattaggtgctcctgagggtatctgcggaatctcacagttttggatggattgggtgttgtttcatacccatctgtgatatagattgggcttatagctgaattcttcctcatgcattttacttgcttgttattctggaattaagtaacatctagattttaacaatgcccagccttcctttctttaagttttcttaagcagaccatgagtaacttagtcccagtgcaaatatccagttgaagaaaagcaaccaactggggccaaataagtttagaaaaataaaattgtccagctaacagcttttatgatgggaggataggaaaaaatgtagtgaatatactgggtaaatggatttggaaattttatcctgtgatagaggctgccaacctccacaaagccaacagtctaggaaaagaagttctatttgtctggttaacccaaggccagattatgaacacctggctcgaggccagtagcaccttcctgatggcagtaatgaggacaaggcaaataaagagccgctattggcaccattgctcacatacccaccctcccacgtctaaacctaacttcagcaatcttgctaagggaatcatctcaccactgagtttctagtggatcccatcatcttttctagaaaagcatgcaaatttgtaagacacatatccagcactacctctctgtgaccagatatcacatgcttcaaaaagtagagttagtggagatttttccacgtgtgtttgccaggctgacttctgagggtggagatggggcagggagtgagtcagcgcccaggtcctaaagaagaaaagactcagatgactgagacgattgtttcagcatcagaggaggccgctgggagatttctcaggattgagcttcctgaaacctttcagtcacgccaagaatgggaagttaatttgaccttaattctgtttaagcccttttgggaatctttcctaccctaggtactgacagaggaaatatggtgccaccagcctgtctttgtgtggaatgtggtaacctagggtctacctagaagataggagtcagacctggggtttgcttagagccaaattgaaccctatgtaaaaccctggccaaagtgcatgaacatttctcacaaaccagtaagaagactggttttctgggggggatggacacaattactttcccctggctttttcaccatagtggcctccatgagcattcgctttttccagacaccctgaagcaaaaaagccatacaaaacaattcccccaatgggaaatgaaaacccataacaaaacactttttccctctcattcccatcaccaccccactccctccagcccaacaccctgaatactcacaagagaacactttatctatacaaaattagaaaacaaaatatttacatatgaaataaacaccatcttgatttctgttgccagcggagactgaaagagctcccttggttctagattgctgttcgctaggttagttggtttggtttttttgtttgaaaggggtgaggtaagaggaagatgaggggatgagtccctgacccctggacagagtcagggcgaagcagtgtttacgtggcccttcgccttcttcctcctggaggtgcctcatgccctctgtcctctctcagtcttttctgttatctaaggtaaagcactccgtgctcctctcaccaaatctgtgagaggttcagccccttgcccccatgttcattttagaaagaaaacaaagctttacaaggccttcagttggctttaaaatgaaagatactgaggtaaaaatcaaggaggagggttggggacagcagtcaagggcgggatgaggaagggtcacgagtgagggcaaacaggggcgaagagcagccctggagggagtgacttgaagagacatggcagcttccttccagaggaggatgagcacctttctggtttatgtgtcctgtgtgcaacatggcgatcctgcagtcaagcttccacacagacctggggctctctggatgccaccctgtgtaggggaggatggcaggacagtggaactgacccatagaataaatagccctaccgcaagtttcaggaccggcagtgatacatattcatttcccttctcaattttccaatgttaagtgaagggagcatcagttctgctggtaccctcatccctggagttttatacatgtatatctttttttattcctcaatggtacaatctgagagggaaacaaggtgttgcaggaaggtagaagggcttctaccaagagtgttcactctgggctcaagtcacattcccagggagccaggcccaaagaggtggtggagggtccctctctgcccccgtctcccatttccaagtctcttcccctcttttcgtacctccagagctgcactcatggagtgcagctcatttctcttaaaggtcaagctcatttctcttaactgtctgctctgtagcagttgtaatcagttttggggggaagaagcctgctcgtctagcttcaggttaagtaagaagggatcaaagcattggaaacatccccctctctcacttaccctaccatacacgactccttacttcttcaaaggtggcttcgttcttccccaaaccttggccagtcgagagtctaaatgctcaaaagagctttgtagaatcttttgctcccaagtgtgggcaaaagaatcatggctgtgaaaattcggtttccctttagccttcctggaaagttcttggttcaaactggttgaaacaattgccaaccactgaggacttgtttatgtaccttgttcttgcaggattgctcaccgcctttttttgtttagaccacagaatcttctttatcaagaattttcattctccttattccagaaggatgaagggagacacagccaaaattcaggtaatacatggccatctctgtctgtatataagccaaacaatcacactgcttggggatattgaaagaaacaatagaaagagtcaaggttgccttctcttgaggcacctgactacacatgggtgcaagtgtgcatgaacacacatgcacgcacaatccacctgctcttgtccccaaggcaccgtgggacactatcataacgtactttccagtttgttcaagaatccactctgccaccaatgaccttttgttctgttcaccaccactatcgagtctcatggggttgaagcaagcattttttggcttatatataaacacaaatggcctcccaacctctgcttggcacatgattcctagacagatgtcatctaagcagcatgaatttagccagagcctctttcctttcacaagcagtgtgctaaatggtctcacatagatgcttttgcttcctcacctaaatgaaaagatcagtttgggaaaagctacctttgtgctcacatagcctctttttggttctcccagcttcactcaaagaggatatcaaggagctcttccacaccaggaggaagcccgcatgcagcccttcctttctccgctctaccctcccctgctgagagggcccatggcatcatctcatgggaacaggaatggctgacagcggggggaagaaggagagaactgtgaaaaggaggagagatggtgctggtcaccagggttgcccccagtaggaaccagaactccaggatcccataaataaattaaaacaagaaaggagcaaatgggaaccaagttcacccccgtcaccctccgtgacatgcgcatcacgcgacccacagccttaccctcccgtacccaccttaacctctctgttccctcactcagacatcagactcaatactagaaagtttctcataaacatgcccattgctggagccattgaaagccctggggtttttgttgttaggcacacaggggttggactggttccctatacagatgtccttctggaaacgggctggcacggccccatgaagggccgagaccaccggcttgttggtgacaagggcccggaagtccggcctggctttcgacgcccccgccaccgtgggctgcctgaagaagtaggatttgctgccatggagcaagcactggtcgtccccaaaagtggggatgaaagggttttgcgtgacccggtcagggtagagcgacttgctgagcatgtacccgccgccggggttgttgtggtggtgatgtccggcagtgggcactgaggacttgttgttggcaaaggtgctctcgccagctgacatctcaaacatgtgggcgtaggggctcccatccatgaatcggcccttgtctttcaggcttacgctgcgcggggccagggcggcttcttccttctgcaggtccacgaaggtgtcgtaggagtgctgccggcgcagtttgttccggttcttcttctgggccttggaattagtcgggctctgagggtacttagtggtggaggcgtttgacgtcaccgccactggggcagccggctggtccagttcctgcagggagttgtcctcactgatgtcatacaggttgcctgctttcttgcaagcctcacaccggatgcacgcctgcctgcccgagttctgacccgtcaccgtcgtggagtagttgtgcagcttggagggacagctgcggcagaagttgcccccggaccggtcctcccactccacgttggtcaggttcttctcccaaggtgcaggtaccccgctgaccacgccgtgtttgtcgcccgtcccgtgcttgatgtgagacctgttggtacagggccctcctccgctgacggagtcgcgcttaaagtcatcactccgctccttgtagatgtcggtcaggtctacgtgctcccagtggggtgagttctcctttgttcggaactggtccaggtagaagtcccgtagcccttccttgtccctgaagtagcgcttgtggtcaggggagcggggcggtcggcgacggtaggccagctcgatctcgtcaaactccctgcgggacttggccgaggcaggccgcttcttcaggctgtccttatattgctgcttacgcctcttggcggcattgccctcgatgttcccataggtgacggtgtgggttgagatgtcagagacatcggagcggatcaagtcgtcgtggccactgtagcggtcgctcttgaaggagaatttgccgtacaggtcactgagctggctgtgcttggaggaggggaggccgatgtccaggggcttcttgctgatggacctggactgggtggtgaagggtgggttgtcacagtcgtagagcccatcgatggagctggcactgccaatactatggggccggtggtgatggtggtagtgatcttggtacacgttgctgtccttcagctgcaggttcccgaacgttctctctacctcactgatgtagtcactgaagaggttctcctcacagggcgggttgttgtaggatttgcagtcagaatgcgtgaagctgcggcggtgctctgagatgtcatagacggatgactcccgtcggatgaagtccagggcgctctgcggtgagccattcacaccagacaggttagccatgttcttggccgtgcgcagcaggcgcaggatgttggagtgtgtgttgttcatggttgcggtgggggagttcattacagactggcgctcctcgatcgccaccccatggatgcagctgtagataccctgaagcaagaatggagggacaggttagatctccagagaggctagaaatgaccacaaaaaacactctcccaccaataattgctccaactggataagaaaaagggaaagcatgaagcgaatagtctaatatactattagatgtggctagaagtttgcctaatttatacccctaaatttggtgactgtcatgtggtgagctgaggtcagtgacctggccatcagaggggggggcatggccccacccagtaacttgagcaaagggactggaatcataagatatggcatttttgcctcagcttcactgttgacttaccgtggttttctatgcctagattttcacatcttaaaaatgaggccatgatatcaacccatagcaaaaaatatcatcagcctcctggaaataaacggccatgttctatggacactgaggttgctctgctgtggctgggccacacctggctgacagtaaagcacaggggagctcagtagcttacaactgtcactcttttctagctctgacaaattttaagcaggtttagaattttggtcaccaaataacagctgagcaattctcttcttgagccaagcatgaacaaaattcacagaaagagagaattagcaagccctggggtcaaagaaggatttttctcctgctgtgttctacactgtgggagggaagaattgggaaaaacagccagtactaaataggaataaataactcccttgttgaattctctcatttattctctctttagctcctgttttccttcttatactttctcactcacttaatattatcatcaataattaacatcttaacaaattagtattgatcgagagctccctgtgtacagctctttgtacagggctttgaaggacaccgtgcaggagaggcaacgggctgggttcctggagggctcagtatgtttgattctaaagtcaagccaacctccttctcacatcttgttccctgcctggaaaggtggacaaacttggaacttttctccctggctagggaaagcatatgaaaagaggttgtttgaattgtgtcattataatgaacgggactaatttggaaagggaagttgtctccgtggatgggaatgagaggggagagggttagaagaatcgtagcgaaatgggaaagaagaaaggtttagacaaggtaagtctcattgtctcacagggcatcagcaagatggaagatcttcaaggtaaggttattccactttcccagttcttctaacccttcctgattaagctcaagagaaaattccaagccttttttcctctatagaggcattgatcatgtcaaaggattataaatggggtttttattacacatcaccagctcccatggcttctggtgttcccctatctgagatcttagggaagggctaccaaggaagcaacatggctcagggatcatcaccaccccaagttccagcctcctgttctgagctcacctgatggcctgaattaactcacagccagaaaggacacggagaaattgttctctatcagtaaaatactataggaaaatgatgaaaagatgaaataatttaacgagaaatcaattttctcattaatacaaaactccatttgagtcaaagttggttggccatatctggaacctagaccttcattctaaaaggacatttgagttcacctctcatgacttagtctctccactttattaacaaaaccaaaagaagctcactttttaaaaaaacttctccctgtgacctgttcatacataaaactgtcttcctagtgtctcattttagactaggaatgaagaggagacctaaataaagaatgacctaagagttttactcttgctccaactagggaagtttctggaatgtaaatttcttatgagtcagagcttatttctaaaggttctgttaagctcttcaactctccataaccaacacatggttaaaacatagagtgaaacaactaataatatacctttgtatgttaaaataagagagatatgttacatatgattatttaaatagaaatgtacatttttaaaggattagacagttaatacaatttatacagaaccaactaatggtgatgaaagacatttggtaaaaagccaaattttccattttgacagatctgtcagttcttacagagaaccaactgcccaaatcccacacagaaagctgtttcttgaaggaaatatagtatcacccacttttctgagccacttgcaatcatatcacacaaactcctaagaaaacatacatgatgtggtttcttgcttgagcaacatgggggtggagatagtgtcctcttggttctctctgctttgcacagtgctaggctaagctgtccctaacaagctttaggcatttaaatcaaaacacttactctgctgatggagaagaccatgccaggcttgccagaacagacacccataaagcaatgtcggaactgccaatagaaaaggtgttcgcagatgaaggtgatgaggctgagagccatggccgcccccaacatgtagaagacccctgccatgttgtcaatgtccagctggctgctcatgacctcattcttctcattgtgacaaatgccagtgagccagagagcttccagttcttccatctcccctggggaaaggacagagaaggaaaatggataaaaagaggagacaggaaaggagcagagaaaagggagaaagaggagtattgagcaagaaagagaaagatacgtgacagaaaaagagacaaggagacaaaaagaaaggaaatgaataaagttaacagtaatcttattaatgccattacatattaattcatcaacgtacttagtaagcattcaataaaaatttcacatgagtaccgcaggcgatatgaacacatgagacgttgctcccgctctccattatctagcctgtataaattggcatataaataatcacaatgacaagctgtctgcaggtaacaagagtccaaattggtgacagtaattctgtggatggcatggccagtgggttttcgtgaagtaagtaggagttggaagtgggcatgctggatggatgaattttaatttacattgtacaaaaaggcactccaggcagcaggaatagtatggtcggtgggaacacacaaggcttgtttaagtaaaggcatgcagaacagttcaaacagaaaaaggtatagtaggcaaaagaagctgaataaaaaagagtgatgtaagagtgctgaagatctgagtatcagattaagcattctgtactttatattatagacagtggggaataacataatcaaacgagtgattcagaaaattgcccttaaaattgtgcaaagcagattgggtagggagaagacaagcagagagagatgggcagagagattgattgattccctagggcccctcagatttactgatctcttgttgaagaaaataaagagcaaagaggagtaagcttggataaaataagacccccaaattcagacttgccttctttacacattgtttaacggtgctttgatcactttaactcatgtcagatttcaatgacctttttccacttcaccagatgctaggaagtaggaggaagtaggaagaggtcccagacaaaaggaaagtaaaagaaaccatgtgccctagaatgcatctaattctagacaagcaaaattctgaaaaatctcatggagaaaattgcctattcccatagttctactttggctaaaaaattgaactttgcttgcataatctgactaaagttttggcaacttttgcaaatcatctctttctcatggatacagtctccattattgcctttgagtgacagctacactaaaattacagaagctcttataccaaaatggcttggtaacactccagctaaaacatcctcctgtttccaatgttaatcaaatcacttttcccttatttttttgatcaaactatgattctcctaactagtggagcagacaacttcacctggattctaaaaatccacctgtggtcttctgcttctgatctcatccttaacagcaaagctgcagacataattgagatagccacttggctgatggctggtgaagccaacaagggtctggctgctcatccacaactgagttagtttctgtaatgctaacagaaacagtagtttctttgtacaataaagtgaagagggatgcagaagacaggaatataatgaaacagaagatgagatttttttcaactcaagttggtggttcagtctgctgccaggatgatactggggagtggctgatggtgtctgcctctgaggaccctaaccctgccttctgcctcttccagctgaaagagcaagatgggagagcaggaagaatgaagagatggccgcaagtttatttctccgccctacctctgggcacataaagagcagagaccttccacagttccatctattattttggccacatgtgagatgactggatgaaacatctaatatcagttctcctactttatccctgaaggtttgattatagcctgcaacccagaaaaagacctccttgacaaactgcttcaatcctctccctgccatctttcagcttgttatgggttgaaagatgttatagaatccccctaaaatatatatgttgaagtcctaacccccaataccttgggatgtgactttatttggaaatagagtcattgcaaacataattaagctgagatcatcccagagtatggtgaacccctaatctaatatgactggcattcttaagaaaaagggaaattcagacacagacatgtgcagagggaaaacatgcacactggtaaaacaccatgtgaacatgaatcagaggtcaggggtatgcttctacaagataaggaatgccaaaattatcagcaaaccaccagatactataggagaggcatgaaacagattctcccttgcagaccccggaagagattgaccctgctggcactgtgatttcagacgtctagtctctggaaatgtgagacaagacatttctgttgtttaaggcactcagtgcatggcactttgttatggcagcaataggaaacaaatatatacccgaaaactacacaatatactgtgaaatgcttttccggaaatgcacaggttaaagaaatggaagaaaaggaaaggttgatgttttggactggccatcagtagaggacaaatgggcactttccctttcttgaactcaccatctccaaagagctgcaggatagcaaggtccacctggcgcttccacccagaatctttttggatggcaatgccatagccagtggaagcaaagaccttcccactgccaatggtcaccagcttgcagccttcatctctgcctgccatatagttcagcactgctgcatcatagatgaaggcatccagtttcctgtacaggaaaaaagcaaacaaatccaatggaggaattttagaacaaaactacctgtggggccattaatatgaagcagtagggttccagaaaactatgtggagaattggttcaaagtaaggtttaagttggaactctgccagaatctaaagcctaaatcccaggctgttctttatgtgcttttgggttgaaaggaggagttcttttcttcccactgggaatgatgagaatgtaagttgggcctgaagccaactcataaactgtgtctgaaaggaagaaggagtaaaaagggatcaataaaaataataacagaaataatgaaaagtaaccactgcaacgagcaacaaatagcatggggttagatttatataacatttttcatttctcagtttattacagtctggagtggggataagtgtaggtgtttgtgtttcaatagatgtgcaatgctatttttgtggtcaggaaggttccagtattctgttgtgcaacacaaggatagaggtgaggggttgaggtggtggcagtacaggcttgtgtaagagcagatgagtgaaactacaagagaaagcaaaatacagaagaattcagatctctcaaatacataaattacagcatatagttcctaaacatataagaacttcattttatgtattgtgctttgcaaggcagaaatacataaaaaagggaataagaccaggcgtaggggcaggaaggcatgaatcaatatttaaaaccaacatttaaacatatcaaaggtagaggaagaaatttagatatagccttacaggcaatagagaggtctgcaagaaagaaaagcaacaccattattcccttcatttttattagttaagtcaccttgttaggtacccgatagaaaggggaacaccaaaaaaccaaatccctgatatgaatgagaacagtgggtgtagcagtggtcagactacccaaagtggccctaccttcaagctcaaattccatcttctgaaatcttctgtgactgtatttatggtgataaaatagaatctaacagtattttaagtaaccatttatctaggtgccttttccagacctggagctacaagggtattgagacaaggtccaagtgctgttagtcatcatacaacaaagaaaatcagctacgagaccccttgacctccaaatcccaacatctataatgctctgttatccattatcttccatagctgtggcttgtggaggccaaatgaacaaagggaccagtgtggctgggactgtgcaagccaacacatgtgtaggtcatgaactcctatgaatggacaaacactccctagaggacagagtatgttaacacaagctggcactggagatcagtcaacgcattcttactgttaattatctaaaaacatttacactttcccccttttatttctcccttgtccataagacaccagaaccataattttcacctcttggacaacaggtctttacatacacggcacaaataccttatccttcactctgccctcctacttctacatttatttcactcttatttcatggttacattagtgcaactagaaaataatttgtaaaaaaaatacatagaagtaatagcataggaatcgttgtacactggtctaaatgatacgatcaaatttaacttggaaatccataaagagcaaatgaagtcttctttaacattttatgataccaagcatggtatacctagtgcatgtgattcaatagtatgcttaataaatgtgagaaacagatcaaggactctgagcttggaagcagttcttaccctgttttcagggagagcaatgcatcatctacacccctctggttgaactttcccatgtaggcatgcatttctgcatagttattgcgaatatttctctctgtgctgccgttgggcacggtcccaaagcggaaagggggtgagaagtcattaggtctctggaactggagagagaaagacagatagagacagagcgggagatggagggagagagagagagaaaagtcattttagaaaatgtgaagagacattaagtaagttagcattagtggatttataatggaagggacccaactataattcaccgaatacattagccctcactcaagagcagcaattgctatctgaaagcagacttcaattcaattcaatttagtacatattgctgagagatttctatttgcccaaccctgactttaatctataacccttctatgttccttttatgtacactacacaataccagtgttgatgggccaaaggaatgtgctggtggcttaattgcagtgggctagtcacctttctttctaaaaaaatatgtaaaatctgtattcaggcctcttaaaggcctaaatacacagtcattgcactattttgtccatagggccttagtgaggtgagctatgtggtactcctgaagataatttgttgagtatcaaatatgttttgctaagaaattttcttttgaccttccctgatgcactgaaagctcatatttatcccacatgagttgtaggataaactgtacaatcaaagacaattttaattatgttccctttcttgcttgagactgagagtacatctccagtgcccattataataaagagaaacctcttggattttcatccctatgacatcagctttatttctggctatcaccctgcaatgcgtaagtctttatgttgcttcctgaacacaaaatttgttcatttgtatcttcacagcctcatatagtccatctcctcagtgccaactcatctgtctctctaggccaatttatatccgtttcaaaataaaactcaaaacaatttcttcaagaaatcttctgtgaattctttcttccatcaagtctaccccaaagtgacccatcagaacctgttattctttgtttagatcactgtaatcctacacatgcaattactctctaaatgtgctagctcgtctctgatgtcatcattaagagtttaaactctagattgaaacagatacggattgaagaccagctccgccacttaccactgtgtaaccttgggcaagtagcataaacgctctgtgcatcctgtcctcatttgtaagaaggagatgataatgcctaattttcaagaatgttgtgaggattaactaatataatgcataagaagtgcttggcggtcgggcacggtggctcacgcctgtaatcccagcactttgggaggccgaggcgggcggatcacgaggtcaggagatcgagaccatcctggctaacatggtgaaaccccgtctctactaaaaatacaaaaaactagccgagcgtggtggcaggcacctgtagtcccagctactccggaggctgaggcaggagaatggcatgaacccaggaggcagagcaggcagtgagctgagatcatgccattgcactccagcctgggctacacagagagactccgtctcaaaaataaagtgcttggcacagcacctggcacacagtaggtgcccaataaatgttctcttatattatttttaatttgtgtctctattctgcatttcctagtaaacccactctctaagcttcttattctattagtacagcaatgatcattgtagctgtgctgtgctttggcatcggaacgacaatgaagatatttgaagtcctcttggtttcaagtaatagtaccatttactttggagaaacatttgaaaatctaacctgccaactcaggagaactctgaagccttgggattgcctgggattagaagtaattcttttccttcttagaatatgggagttccatgggccacaaaatatctcagcaccaggagccataaatgccatcttaattgctcagtgctggccatggttaaaactagagtcatgccgtggtgttaggcaatctgtgatgcaccaaacaactactacttcctgactgagaaagctccctctctgactcatcacagggctttttgacattagaagttttcgtttgattattttgaaaggggttataatttttaagtggataaagacactacaaaagagtaagaaaaatctacagccaaatgggccactcagggttaactagcccaaacctttcatttgacaaatgatgaaacccaaagagggtaagtaatttgctccacatcacacagtggcattgatagctaacagatcagagctcaattcgcctaattaatagtcactcctcactgtctccagcagatagcaagcttaaagtaaatagggatatgctttattggaagagacagacaccagaatgctttgcataccactatcaaatacaacacttcagatgtttgaagaaagatattcctcaaatcaaaagtagagtaaataactatggtagatagcaatacaactaattaactccttttaatcagtaattccccacaatactaggacaatgacaactgatgtttataatgactaagatactctagggcccaaggtattttctgaaacatcagtgaaaattgcaatcatgtccaatacaattctggtataaattattacactttaatttttctgaaaaaaatggcaatccatgcaaggtatctgcaactaaattttatggtaactaaatggaatccagtgcccagagggcctcacttcctgatgaagctacattataggtagttttcatacagctctttatatagtaatttttaattttaaattatttttagatttctaaatcctgttttgtaattgtatccctgaataaataaaagctaaagaaatgataaagggtctagaatagccaagataactttgaaaaaggaaaaaaaagttaaaggatttacactacctgactttaagattcattataaagctacagtaatcacgagagtgtggcattagcgtacagtcagatcattggaacaggatagagtgcccactaacagagccccacatatatggtgcaagggccattcagtggagataggatggcctttaacaaatggtgttggaataattagacatctgtttgataaaaaggaacttcatttcacacctcataagatacacagaacttaaagtggatcatatatctaaaatgtaaatactagaattataaaacttatagaaaatataggagaaaatatttgtaatcttgagttagacagagatttcttagctacaacaccaaaagcacaatccaccaaaaaaggtaaacgataaattggagttcataaaaataagaactttttgaaagatgcagttaaaatcataaaaaagataagccaccgactgggaagaagtatttgaaaataaattaaagctattaaaacactaaaggaattagataataacatagcaagacttatatagttaaggcatccttcaaatgaaaataatcgggccgggtgcagtggctcacgcctgtaatcccagcactttggaaagccaaagtgggtggattgcttgagctcaggagtttgaggccagcctgggaaacatggtgaaatcccatctctaccaaaaatataaaaattagccgtgcgtggtggcatgcgcttctagtcccagctacctgggaggctgaggtgtgaggattgcttgagcccaggaggtggaggttgcagtaagtcaagattgtgccactgcacttcagcctgggtgacagagcaagaccctgtctccaaaatgataacaacaataataataataataataataatcaaaataatcagaaaaaccaagcagtcagtactgggaagaagggaagtgctggtttggaggcagagaatttggatttggatttcagctttgtctcaggccagctgcatgaacatgggcaagttccttaaatttatggacctaccctcttttctggaagtattattttaatgaataagataatatgtaaaaaaaatacttaatacctggcacatgatggagtcttaaaattcttagttgcttctatggagatgaagttctaacatttaaaattgtcctatgtaaggcaatgttccctaagtttgaaaattcttattctctaatttgttccttaaactaggccagtctggaggccaacagggagagaacattgcctcagaattagccaaagcagtgagtttgccttttcttttgaaaattcttgtcccagcctggtgagatctgtgaagtttacataaaacagagattttttatactgtcattggaacttgaactgtactaaaattcacattcatggagaactgtttagggaggcccgtggggaagaaggaaaaataatttccaaatatcctgatgcttccagaaaatgcccttgtaataaaacttaccccaagctgtaagacattatatggcacttgcttagcctgagtggcaatttgggaacgagaaaaatttagcgctgtcaagaaccagaatgtcttaacattaatagaacagtgaggaccctgaaaaaataatttttaaacaaatttaaaagcctaatatatcagggagctcagtaattgaattaaaaaactcagtctgatttcaaagtagggaaatgtgtatagtactctttattttcttttttcttttttctttttttttttgaaacagagtctcactctgtcacccaggctggagtgcagtgttgcgatcttggctcactgaaacctcaacttcaacctcccaggctcaggtgatcctcccacttcagcctcccaggtaactgagactacacatgtgagcaaccacacctggctaatttttgtacttttagtagagacagggtttcgccatgttggccaggctggtttctaattcctggcctcaagcgatccgctctgctcggcctcccaaggtgctagggttacaggcgagagccaccatgctgggctcagtactctttattaatcacctttggtcatagagcttccttgaatgtggaatctttttctaggagtcacccagattggaattatcaacacatagatttggataggaaaataacacagacaggacaggccccatttcatagatgaggaaaccgaagtcctgaagagatcaagtcgttccagtagacacagtgtagagggaggacaagctgagacttgacccctgagtatggccttccttttgccagctgaaatgctagctgaacagtcctactgctgcctactagggagtgaagccacacactgtaagtggggccacatagagtatcttccttttgtggcaaatcaaatgccaattcccatccttcccaccgcatttaacacagggcttccagcaattgcttgtgagcacacacttgcacaagggcaaaacaatgccagaatgttaaaagagctgtaatctcatttgatcctcctggagagcagcagggaatcagaattcagccctctgagctgttcagatcatctcagcctccatcttaatgacctcaaagtgaattagtctcagcagccatgcaaggagaaaggtgctcaagggccaggagtcaaggcccccacccagagatgagcagacactagggtcctgggctgttttggctgccacctccccgctagagagcttcttatacagcctgctggagaaagaaaggaagaggggagcaagtaagggaagtacggatctggtccatttttaatatataaattgattttcctatgtattaggcattgtaagtcattaataattgccactcttattcaatacctatgtatgtactgggtataagttacattatctcctttaactatgataattaaaatacatccattcatttggcaaatatttgcccagcatctattagggcaggagactgtattaggaacagagatacaaagatgaaaaaaatcagacccagttttcaaggagtttgcattacagagagtcagaaacataaacattcattcagtttttcatccatttactttttcatttcatgtatttattgatttcattcatttatataagcattcagcaagtatttgttggtgtttattgtgtacagaggagatgcctgtgctgaagatgcagtattgcagaagagtatgatcttgccttcaaagagttcacattataaagaagagaggcaaacagtaagcctgttttttatttttaaaatttctaaacaatcttttgtagagataaggtatctccatgttgtaaaagttggtattaaactcccagcctcaagcaatcctcctacctcagcctcccattcggttgactaaagtctgccagaaattatttgccactctatgacaaacaggtccatgtcccctccctaccttgattcttagctgacctaggtgacctgcttaaccagtagaagttgacagaagtaacattgtgggattgctgagacaagggcataagaagatttgcagcttccaccttggcctttggaaacctcgctctgagagaatcggtgcaccatgtcagaagtccaaaaaccctgaggccaccatgccggagattccacctataggtgctcccatctccagtcctaactgagccctggacttctacccattccagtcagagccaggcattagagtaaagccattatggactctccagcccagcctcccactgaatatcagtcatgctacatgaagtagaagaatcactcaggcaagccctacccaaatatctgacccacaaaccagtaaaatataataaaatattcttgctttaagccactaagtgttgggctagtttgctgtgtagcaataggtgacggaaacacagataatttcaaatagtgaaaaagaagtgctaggaagaaattgaaacagcataataggataaagagtgattggtaggagaacaagtttagactggctgtcctgaaaaggcctctctgagaaggtggcatctgaaccgagacctgaataataagaaagaaccagacatacaaagacaagggggaaaatgtatcaggctcaggaaacagcaaatgcaaaggttctgacatgggggaacaagcttggtgtgaccaggggctataaataatgtggcgggtgctatgagcagctgtgcccatgcagcagtgagagaacagaacaagggggctgtctcgatggtgtcccagagcctgtgcactggggctaagacttaaccatttaaacaagaggagcaaaatggtttctagatagagacgagtgtctgttcaaagacacaaggtggtgagaaagattgggcatgatcagagaccacgagcagcttattgttgccagagcctagcaggtatggccatggtgacaggaggttgacacagctgaagaaggaagcagggcctggatcacaaagaaagttgaattctgtgcaaaggagtttagagttcataatataagggatgagaaacagcagagcttctggagttaagctgcctgattcagatcccagctatgccacttgatagctgtgtgaccttgatcaactcacttaacttatctgtgccccagtttctacatttgtacaatgggctgctaatagcacctacctcataaagtttaagtattcaaccagtcaatctgggcaaagtattggcacagtgcctggctgataaatacactatgttagctattgttactatcattattactatcatcatcattgtcatcatcatcttcatcatcgccattggaagcaactgaagaactctgccagaatgacaagattgggtttttgtgttagaaaaagtcaccaggtgctggtgtgcagaacaggttgaaaggagtaagatggagagacaagagctgaagaggccctgagctctggtgagggtatgggtgctacagtcggataagaaggaacagacgcattgtcagatatttccctacactactagctaacatacaagaccacagaggtgcacgccattgacatataaatttcctgaaaggcttctagaaggaggctgaattgaagctggcagggaggatggattggctttggaagggtggcgatggggcgttaacatcaatttacaccagaggaactctctgctttaagactcctccaacctggttagcttccagggtgagaatgaagaaacatacttgttgagaagtctttaaggtcctggcaccaggagaggagcagattctgaaaacaaaaccaagaatgtcctaaatactgatggtgtcaaagcagtggtcgttctgaccaccagtcaaggccatctcctgatcagctgtcacccagtcccaaggacaataatcagagtcagatccggtgaataacagcacataaatgaaagcagctctgttaaaatgaagaggatggtgaggaactgccttcttgggtagttggcttccctgaaaaatggctctactcattcagtctgtgtccaatcagcatatgcagattaggacaaaccagtgctgtgaccttgcagaggcggatattgcacatcctatttgcagggatccatccatatgagatatagaatctgggggcttttgtcttcaaagcttgacaatcctacacataaatattcattccattacttctgattttacatttgcatcacaaaaagaatcaatgcccaaatgccactcagcccttccaggcacccaagagaaaaagtgggaaaggcttaggagatgtgaatggctttgggcctgggctaattatgaggaggtggcagcacatcagaattctgaagacaccacatttttacctactcagcaccctcctgttattattgtcattaccctattttatattttaatagtacttttaaattattgacttttattgtcatgaattttaaccaggtatggaatcttgcagtcaccgccacaatcaagacacaaaacaattccatttctcaaaaagctccctggtgccactcctttcaagtcacacactccctttgctcttaacctccagccactctatcccatagttttgccttttctaaaacgtcatataaatggaatcctgtagtacataaccttttgagactggcttttttacttatgataatgcctttgagattcatctccaggcctttgcatgtatctgtaggtcattccttcttattgctgagtagtattccattatgtgaatgcaccagttgatccatttatctattgaaggacatttgagttactttcagataattatgaatagagcagctgtaaacattcatgtacaggtttttgagtgaacatgttttcatttttctaaggtaaatattcaggggtgggagggatgagtcatatgccccatgctcccaaagttttttacagctcttctatcttttgatcttctcagtttttccaggaactatcaagcaagtacagaaactgacattatcttccttagcccaggggtgttgcaccaaaccatgttttccatcactaaatcttccataataataccctatggcccaattagggtgaagggatatgtatgtgtgattccagactctgggcagcatctggagaggggaggaagtggctgcaggaagcaccctctctcctcttctaccataatcccttgtcgggcccagtgggagaagaagaaggtcaggtgaccacacaaggagtagactttctgagagcatgagctccttcactgttccatggcccataagtgcttgggacagatgtgaaaaggaggtaatctgtgcttacagtgaaaagacaattttagccaggcatggtggctcacacctataatcccaacactttgggaagctgaggtaggtggatcacctgaagtcaggagtttgagaccagcctggacaacatggcaaaatcctatctttactaaaaatacaaaaattagccaggtgtggtggcgcatgcctgtagtcccagctactcgggaggctgaggcaggaggattgcttgaactcaagaggcagaggttgcagtgagccaaaatcgtgtcactgcactccaccctgggtgacagagtgagactttgtctcaaaaaaaaaaaaaaaaagacaatttattgataaaacgtaagtaaacacatgggttatgggctcaaagatctaagttcaaatctgagctctactacttattaactgtgtgactcaataaacaagccacttagctttgaaactgaattttaacaatgttccaaaaggagaaataaggtatagcatctcactacaaatcctccatctcaaaacatggggcctggagtggccccccaagaccctacccctaaaacaaactggctgtggatatggtgacagattagaaagttaaacccttcacctccatgaaagaatctggaatggaggtaagaggaataaataattattgttatatttcattataaagtgttcattggagagaatattgttcaaattcattcaaaaggcatggctgaattatggaaacaataatattgcagaatgtagttagaagctaccggtatataggaaaattgcccaaattaactctgttctcttcctgggcccctgatgaatctgacgacattttgctactgccaaaaagggagttggcatataataagcattcaacaccttaattgtttctgcttgttttcctcttattattaacattagtgctataattgcctacagtggcaaacacccttaagtttacatatgaagagacctgcacttggatgtgagaaggctggtaagtggcctttctcctgcctctggctgtgctgtcattcgaggctgtatcttcacagctctggatgctgtgctgctggggaaggaattttgtgcctctctgaactcaacgtggagctggggttctataataggtcttagaagggtgggggtggtgaggactggaacttattctcctgtcatcaccctcctgctggagccgaaacaaaagcttgcagcaaataaaacaccagttcttcagattcctggaatttagttaattaccagttttcctcgcaacgatggttttaatgcaataaggcagtcacttcttttgtattttataaaatttggatacataagccttaatatttcctgaaatatttcataaaatcagataatggcatgttagctagctgaggcttggtccctgagttagcagagccaagaaagtgggtttattcctatattaactatattaactttaacatatcataacctgcaccttgaggttttaagtgtttggcaaagtcttgtgtctggccataaaatatcacatcagtagcacacatttaaagggcataaaccacatataagccactgagctctgaaataaaatgaggcaacagatacaatccctaccattacagtttagctggaaataatgatgatgataattatataattccagcagcagctaatgcttctacagcactcaccatgtgtcacataatttacgtatagtaactcattgatcctctcattgatgctatgaggtaggcattattatctccatttaatggacagggaaactaatgcacagacagtaagtaatttgaataaggccatacagctagaaactatcagagcaaggattcaaatgcaggatactcatatttaactgtaaaacacaccacagggctctatgcaaatagaatggatgctcagaaaatgtacagattaaggaatccagtgcctgaattagtatgcctatccaatgggaggtaaggaaaggaagggctacggaagtttagagggagtgaaaatcattacaaaaggatatggttggggaggctgcacagagcaggcagagatggagccaactcctccagattggccaagtttatccaggcaaagaggtctggggagggtgatggggcaagcgaaatagcatgagaaaagaagcactgggacgtgagcatggcatctgcactgacgttgggaggaatgtttggcgcctagatagaaaccatcccatggagcacaccgaatggtcagactgaggaaggacactgtgaaccccacagtgctcaggtgtagctattgttcagctaaagcagcatggctcgaagaacagagaggttagagaagggacgtttactggaaaactactaagagcctggactattttcagagggaaaataatgggagggataaatgaaaaagaaagacatcagagtggaagccttgactgaatccaagtctgcctatacattcagaagaacgaaggagaggaagcggcagagtcagcctcatccccaccaccttctctcccactctcctccctcacccactcctcaggagccacactggcttcctcgcagtttctaaaactcaccaggcaagctcctaccctcacatgctcttctctgccccaaaagccctggatatccacatatattgatccctcactaactttgggccagacttaattgcctttttattttctgccctttcctccttagaatgtaatataatggacacagttttggtctgttttgatcactgctgtatctctagtgcctagaaaagcatccaacacttagtaagctctcaatatgaatgaatgagtgatttaaagaatgaatgaattgaatcgcacatgtggatatatttattatatgaaaaactccattcaaagtgcactatttagctgttgatacattatcatgcaacacacagttgagcattaacattcctcagatctagggcaagcctagcatctctggtgaataaggagttaatgtgtcctaatgccagtcaaggacatctttcctggcactttctccatttttccttcacaaaatatatcagatctgaaatcccgcaagagcctgtcagacttaggacttgacaatgcatatgaatatttctttggcaccaaaaatgtgacagagttagagatgattatgataacatggagatgaagtgaaacagaggcataaggacagaggcatttgagttttatccttaagtcatcctgtgtgtgacaggtggccttcgttgagctccttcaacctattcttacacaagattgttacaaagaggtgttattactgtccactgcactctacctcacagaccaacttgggagggtacaagggattgttccagatattttataaaagctgtgggtgctagcaaagagaaatggcctttaaagaagctttcaagtaaagaagacagatggattcaccatggaaactgggattctgaagttgtaccaggagcttcagcagctcataaaattttggaggagataaagaagataaagaagactaccaagatttccacatgcaagattcccaatgaatttagggttctccagttattagcacaatcacctgaggttctaatacggtatcagcatcttcagagtcatgaagctggggtggggcggaaatgtcaaagacctccgccaggcggaggccagggtgagtgaggatccagtgacaggcaaggcagggggacaggtgtgtctctgccctcctggcaatcaatcagatctgtcagttccaaattgaggcacggaaatgccagcatgtgtacttactgtcacattgtgacccacttacagcccagcagagcttcttcctttggtcaataaagtcagccctatgcgagggacactccggtttatggaatgttagtattgggatgcagcctggcgatcccaccacgcacactgcatgcccctcggggttcacaacggaccatcacaggagaggactcgaacaatcctttggtaaagaaacttatgtaaccctgacacagcatttccccaaacttattttcccatggatttctttttctcaagaatagccattatgtttcccagaacactcataggctatgaaacagtttgagaaatgccagttgagcaactttctgcctgtacagaggaggaaacagaggcctgggaaattcattacctatcgaagaccaaacagccattgtctgcttctgtctccatctcttttgtttttaatttagtctccacacatgtattgagtacctactctgcaccaggagctgccctgaacagtcgacagcaagatacggcagacatttccatgtctcaggcttttaggactaatgggatgccagtgtacttcagttgtccttaatggacctccaattataatgcaaacataattattataaggtgactgctacaaaagtgaaatatcaataaccatgttggtagaaaaatgaagttcaatttttccagttgactaagggttaagccaaaaaacttactttcaacccttttgatgaaaatcattctaaactatagtcattcaaacatattcagtgagcatctgctatgtgtcatgatacagggaggtaaatgatatacagaaattaagacacaaaagaccatacatggtttaggacattatgtttactatgtacttattccaggaatatcctagaaactgtcattacttttaataatttctttatataagctttctttgttatcattatatcttttcccctctaaaagtggcaaggggacatagttattttagggttggttactttttgttacagaagcgatattttcctatgaaaatagaaagttctcagcaaacacttggctgactgggaagccgatgcctcaccattcaaagaacagggcaggcttaacacatgcatacaaggaggggactcctgtgcctgtctcacacaggagccgaggaataatcaggggctttgaagaagtcattgccaaataggtcctgaaagaactttataatttaagatccgacaagccacatagcagcacagttggagacctcacttactcagttctcttctgaaatacctgcccgatttagatggtgtgacaggcatagaaaccacaaggtgagaaaattctatctgggattctaaatgtcaaatatttcttatctacattaccctctcttccttccccctcaaccattggtcatgaaactatctttcactgttctcaaattcacatggctaataaagagtgaaaagtactgccttatgctgtggacactatatgaattacataactgtcttcttattcattcattcattgactagttggttaattaattcatctattaatatgtgagcacctatatgtacgagaccctattttaattactgcagatccattagtgaacaaaacagacaaattcttgccttcattgagtttacagtctagtatgaagagacaattaaatattataaatatgttaaatattaatatatcacaccatacaacatataaattctattaacatataaaaagatggaaggacagagaagagtaaactttctttagatcctcttccaaattttagatcagatactcatctggtggcctgaacttagactggtcattccctggaaacccttgtctttaacaatataccactcgtaagcatcttcctctctgagtctagccccactagcctgatgtacattttcttttcttttctttttatttcttttttttttttttgtattgtttttgtttttgagatagggtcttgctctgttgcccaggctggagtgcagtggcacaatcacagctcactgaagccttaacctgggctcaagcgatcttcccacctcagcctcccaagtagctgggactacaggtgctttccaccatgcccagctaatttttaatttttttgtaaagacagatatttgtcttgttgcccagcctggtctcaaactcctgggctcaagtgatcttctcacctcaacctcccaaagtgctgggattataggcatgagccaccacacccagctgaattttcagaagaacaacttcgagtttatgtcggaaaaacatattaacatttattttttccacttaaaatcagaagtcctgtttcatcccaggcttggagcagacactttttctagagtaagcaaatgggctgaagaaatagtattactggtataatagcttgcctttgatttgtaacagatatttggggaaatattctcgatgagtcaatttcacacctgtttggttggtgcaaaagtaattgtggtttttgccattaaaagtaattattttttaatgacaaaaccgaatggcaaaaaccgcgattacttttgcaccagccttaatatagtttaaacatgcaaattagagggaaacagactcactaattgggatacttcctcacctacctagtgggaagttactcacaaatggtcttattgaactccatgataattctatcatgagaccaggccactgaatccttttcatggtctgaaatgtgcatctcatgttctctttgtcaatggattacagagaaggtagcctacttcaaaattcttgaaattccaaggcaggagctaattaacaaatggaaaatgtttctaacctacagcaaagaatgctgtaaaataaaacgtttctctttcaaataagaggctccatcactaggcaggtgagatacttagtgaaaggatagacatgaccagttgttgggagtgtggggcaacttattaaacacacagggaagggtcttgttttctttaataacttaagtgacaggatgaaaaaacctgctctttaaacctgctgtaggcatcaaattggattggatggatggctacttgagaaatagaattaaacatcaaaacagtaagtctggcctgacaaaagaagatattaaaaggatgaagttaaattaggaagcatacaaaataattcttacaggatgtaaaaccacactgcactagaactagaagggacaggaacaggctttgtcaaatgcatgctcaagaaaaatcatgcagttctacctgaccacatactgcatgcatacataatgcagtgctgcttttttaaaataaagagcctgtcactggacgctaaagagcaatatgtggaatggatgtggtcaggctgcgttatacaccagtaggagggcttctgaccaccgtgtgttctcttccataactcacagcagaaggttcagaaatgattaaaagtgaggggagcaagtcttcttgtaaaagattaagactatatttagccttgaaaggagcaaaagaggaaattcctctgttgtatttaccatcctattttttaagaacgaagtgtctgcctccctcactagactctgagagtagggctgtttcagcatatctccaacgtctcacaaggtagggtttccatgacattttgggacatacttatactaaaatcatattcacaatttacctgaaattcacatttaactcggtgtcctgtattcttatttgctaaatctgttagctctattcaaagattaactagtaactattcaataacgattaagctaattgttgttatatactaggtattattttaaatgcagaggatatagtaacttttaaaagccaggtagatgatacaacagaggctttagttaattcaaagaaatgaggacaggagcaggattttggtaacaggtagaatccaagttgaacaaggggcttacaaggtgattgagggtggcagtttctagagactttgagataacaaaacagagctactgatcttttctattctgagggcctctaggccttagctataggcagtctggcagatgctaaggactcctgagatagactaggtggttggacactaaccttagtaccaacaaaaagatcagagattatgtttatgcagagctgttctgattttcctgtactctattccagtaagtgctatgtagtatttagaatctatctgatgaatgaataaatgaaaagtaggcggtgagactgaaaagcaatgaaactgacttgtatccctcatttagagaacatcattacattctacttgcaactaacagatacacaggataagtcacattaatagctagtatgctttaagaatgaatttgccaggaaaaaccctatgtggtatagaggttggaagacaagctctctgggctgggaatggagaagaggagcttcaggaactaaaaccactgggactcggcctctcccaaactcacatctaacttgaaattactatgaattttccaaatggcaaggggccttcagagagagtatttcctttaatagtggacagattatgatagactatcaactatggcaataaaaacaactttattgctaaacacagtagtcaaaatgggtattaattaaaaacttagaaatgttataaattatctggctgcatcaataatttgcaatgaaactaaggctcttctctaagtctctgagagagcttgaagtagaataaattaggtttactttttctgagtgtctgaaggaacagaaaattctttggcaatatatgccatgcaagcagggaaggccttaagaaagacctagtttttaaatttttatttatttattttattttaagttctgggatacatgtgtagaacgtgcaggtttgttacataggtatacacgtaccacggtggtttgctccacctatcaattccccatctaggttttaagccccgcatgcattaggtatttttcctaatgctctccctcccctagccccccactcccgacaggtgctggtgtgtgatgttcccctccctgtgtccatgtgttctcattgcttaattcctacttatgaatgagaacacgtggtgtttggttttctgttcctgtgttagtttctcactagtttgttgagaatgatggcttccagctttatccatgtccctgcaaaggacatgaactcattttttttatggctgcatagtattccatggtgtgtaagtgccacattttctttatccagtctatcattgatgggcatttaggttggttccaagtctttgctattgtaaatagtgctgcaataaacatatgtgtgcatgtgtctttatagtagaatgatttataatcctttgggcatatacccggcaatggaattgctggggaaagaccagttttataatttgcccactcctgtgagaaaccatttccttggggtagagcccagtagtcaggtggaatcatagttgaagctcactcttgaagtcattgttttctaccacagagatgggcaaaagacacagattcagaaatgctcactgagcccttactatgtgcctaggaggatgctgggagcatgctttcaaaagacccacaaggttggctgcaaagaggtactaggcacctcttgtctgagagggccatgaagatgctcttcatccaggcatcctcggagccagagctagtttcaaggggtctaagcactgcaactcgcctgctgccccttccacatcttttttagccctgacgtttgaccttccctccaccagccctcctactcccacctcaaaatctcactgaaacaagtgagtgcctggggcaagcagggtggaaggagggctgagtggtgggctcttgggtgtatttgtagcagtttgtggctttcagggcacatgttaatcatctgctagaaacagcgtgggctttgtgagctgggtttaggagcgaaccctgggtggatgtaggacgtgaccactaatatttattgaggatttagcatgcttgaggcactcttctaagctttacaaagagtaactctttcatcagcacagcagctataaagtaggtaacattttaatccccattctacacattaggaaactgaggcatgagaagggtttaggaacctagccagatcacatagcttcttgtcttagttttctctactgcacagtagaggtagcatctacctaaaagtgggagatggcaaatgagtcaaagaatgtaaagcatctagcctggagaatgccacccagcagtcactaatgacaggtatgctctctgagactgtaactattgatgtggtttcatgtgattaccatgaatgagggccatggttgctaatattgcaaaagaacacataatacaaaggttaatatatttttggctttggactgcaattttcaataggcagactccaacctatgaacacattgtcctcaatagttcatttataaatcagctgctcacaaacagaaatatgctgcccccaagaaacaatactataagtggttggctcattaaagccaatttaatccaaaagagagcagaacttttgtgttaatattattagcttatgttcttggaacatttactcatttaataaacttctacaatgtaccaggtactgtctcaggagctggaaagacataattattgaaagcatgtctcttgcctcaaggagcttatgattcagtgaaggaaatgagcacttgctcaatgattctagtggagggtgacgggtgtgtttgggccattgtaggaggacaggggtgggtgtctggggtgtggagtcttgataagttgatagaaacaagaaagaggccctcgctggcaggaacaggaatgagggtagaagagagccattgttctaagaagtggctaacaagctattgttgtaagaaatggctaaccacaaacatcctgttcccaaatacctccttccaaacagccccagcagcatgaacctatctgcagtagcctttccagcatgaccctataaaactcccctccatcccctgcatcttggcagacaggcttctctctgctgtactgcctgttgcactcttgcaatgcacctttcttagtttctctaataaatctgcctttctttacccacaactgtcttggtaaattcttttaccacctgtgatgtagccctagccagttgcacccatgacatgggggtgacaaaggccagaaatgggtaatgaagtattggaggaaaggaaaatgaattgcatttgcttgggttcagagctggcccccatacttcatttatctatacctgtactccacttgctgagctctggtgctttcctaacctccttttggggcatccaagcctgacaccccctattttcacatccacaaaatcaaaagccctgttctttcggtctaagtgatgacatctaggtgttaaaaggaagataatttgaaaacaatgtcttactgatgtgtgattaaacaagcattcaacttccccaaaattgtttttgttgtttatataaagggttaaactggaagtttaaatacataaaagcatgctaaaaaaatgtagtggtcatgaaggccactttacatgggtcatgaaggcccagtttacagattgccttgggaactattttaagtcattcctccttctttactgaaccactaatttttcagatgctgtaaggataatgtggataggaagaatcaatatcatcagaacggccattctgtccaaagtaatttatacattcagtgctatcccgatcaagctaccattgactttcttcacagaattggaaaaaactactttaaatttcatgtggaaccaaaagagcccacatagccaaaacaatcctaagcaaaaagaacaaagctggaggcatcatgctacctgacttcaaactatactacaagcctacagtaacaaaaacagcatggtactggtaccaaaacagatatatagaccaatggaacagaacagaggcctcagaaataacaccacacatctacaaccatctgatatttgacaaacctgacaaaaatcaagcaatggggaaaggattccctatttaataaatggtgttgggaaaagtggctagccatatgcagaaagctgaaactggatcccttccttacaccttatataaaaattaactcaagatggcttaatgacttaaatgtaagaccaaaaaccataaaaaccctagaagaaaacctaggcaataccactcagaacataggcatgggcaaagacttcatgactaaaacaccaaaagccaaaattgacaaatgggatctgattaaactaaagagcttctgcacagcaaaataaactatcatcagagtgaactggcaacctacagaatggggaaaattttggcaatctgtccatctgacaaaggcctaatatccagaatctacaaagcacttaaatttacaagaaaacaaacaacaccatcaaaaagtgggtgaaggatatgaacagacacttattaaaagaagacatttatgcagccaacaaacttatgaaaaaaagctcatcatcactggtcattagagaaatgcaaatcaaaaccacaatgagataccatctcatgccagttagaatggtgattattaaaaagtcaggaaacaacagatgctggagaggatgtggagaaataggaaggcttttacactgttggtgggagtgtaaattagttcaaccactgtggaagacagtgtggcaattcctcaaggatctagaactagaaataccatttgacccagcaatcccattactgggtatatacccaaaggattataaatctttctactataaagacacatgcacacctatgtttattgtggcactgttcacaatagcaaagacttggaactgacccaaatgcccatcaatgatagactggattaagaacatgtggcacatatataccatggaatactatgcagccataaaaaaggatcagttcatgtcctttgcagggacatggaagaagctggaaaccatcattcgcagcaaactaacacaagcacagaaaaccaaatatcacatgttctcattcataagtgggagttgagcaatgagaacacacggacacagggaggggaacatcacacactggggcctgtaagggggtggggggctaggggaaggatagcattaggagaaatacctaatgtagatgacaggttgatgggtgcagcaaaccaccatggcatgtgtatatctatgtaacaaacccgcacattctgcacatgtaccctagaacttaaagtattaaaaaaaaaaaaagccgctcacatggaggtgccagtagtgccaagtggaagggcagaagtggagtggctgcttgtctaggccatctgtaacctggggaaactcatcttggagcatgggtgtattggataacgtgtgatttcagggcatttccaactgagagttgaagttgcattataaagactttcttcaaaaggagctggagaactgctgtgcttcccaataccaaattcctttttgccccattccaaggcaatgctaccacagctgcctagcggaaatgccccttactactgcataaactgtctggctcacacagagtcccagcatgacaattacataattgtgttaaaagcccctttttgattacctgggtttgagaggtgagattgaaattccaagaggagattctgaaatgttggggcaaggtaacagggtgaagcagtcaagagagaaataagtcctgacaactgtgattactggagaatgaaataattcttgctccacatagagcaggtcctgaatgaatgaatggctgaatggtacaggtctttttcaaactaatctcatgatgtgaggtcttagtgtccattgatttcttcctgtgtgtgtgtgttgatcgttctcatgccctttgcctggtggatcctgcctgcccttgactacaggtattctgaggatcgatacatttgtgaccatgccagaccctgtgcttgcagatgtccaccataacctgaaaaatgtacttatggttgtcagaccacagggatatttaagaaatcaagctattctgcccatactgtttggactccaaattatcccaaattatgtcagacccgggggtgaccttctatatcaggggccaagttgcaccaggtaatggtgctctgggagcaccctgtctggtgctgagaactggcattgactttgactctgcctccatctccacttgatgccttctcagccttcttgcctcagcatcagagggttaaaacaattcctctagcagcagcctctcctcattagcaacctggaatcattgcagtgctgaaggctgcattgttcttcagcacttgaatacaatttgcataacgaggcaggtgagagcgcctcttgcctgttcaggcagccctgattggcagagagaaagggatttataggtagttggccacaattaatttggtgtgcttttaaaaggataaaaagaaaagcagaaaattgctcagtgctccaagtcaaaaccacatctgtaccctatgtggtgtatgtgctggtgtgtttgcagggatgggtgggtgtgtcatgtaaaggcatgtgagttaataaccttgtgtgttcaagtgcattttttttctgtaagaaaaaaaaaaaaggctcacttcccagaggttcctgaaccccagaggtcctcagctgcagagtccttcatgacacaatgctgttagccatcttgttcaatttgtatttgaggccactcacagacatcattagaaatcacagtattctttcttcagtaccaggataacacccagctcaacatctcttttgtacccagtccaaaaaaggtggagtcccagctgcctcagggtctgttggcaatcagttcttgcaagaaacacagctggctaatactttactcagaaaactgtggtgctagtgataagctgggagatgtgtagaggagtttcacagaattaagcatttaggaaattaataccaaggtggtttatagccttaagctactcatggtcttcttgtcacaagtacttcagaaactaaacactgctcttgctctatttcccttctgagatgaggatggaggggtgaagtagggtgtccttccctccactccatttcttccctctctgccttttctacttttcccataaagggaaggttgctgagagtgggatcttttcctttgtagctggattaagtaaacacactggttactgcctagcagagagaaaacatgacacccaataatattcgatgtctttttgattcattcatccagtcaactctcattatataagtggttcttaaatgtgcaaggggctgtatgtgcacaaatgaagaaaacaaacttcgctggaaatactgttggttagaatgaacaaggtctcttcaaggttcctgtgcactcacagctggataatgagtggtctctggctggagtcccattatcactcctttgagaatccaagaagccaggccagagaaggtccccaggacagaggctttattagattctgttgcctcaggccaatgcctctagaagcatgccctactttcctgtgtccacacaaagaagacacagggctctggtaggcagtatcacaggggcagatgcaggctgtggggtcagctctctggatcaaatcctggaaccctcactttctagttgtgtgacttaggtgaatttgcttaatccttagatgactctcctcatctgtaaaacgatgttaataatggtgatctcaaagggtggacataaagattaaaagtagtgaggcaggagaatagggtctggaggaagggaacttaaggctgaatcaaggaaaaacatcaaggtctggaggcacggaatctaaggccaatttgcactgacttcccaaagctggatcaaaaagaaaaaacctgggcctgggggcagggaacctaaagccaattaacgcaaacttcctgaagctaaaccgaaaggaaaaaccccatctcccattcccagtagcaaaggatcaaaggctattctccctaccaacctcctccttccaccaagtctcagatggaaaagggagagtgccttggattggccctgggccaagcggggaccatccctttatctgcatagggcaccaattcacctcagtctttagttagccacagaccaaatccttcatccagacaaggggtagccaataggaacctcaaatggggtgcttaaaacccagaaaactttgtaaccaggcccttgagccacttgcttgggcccactcccaccaggcagagtgctttctcgctttcataaattcctgcttttgctgcttggttcctgtgtttcattactcggttactttgtgtgctttgttcagttctttgttcaaaataccaaggacctggacaacttctggtcaagaccctccatcggtaacagtagaaccatatgtgaagagtttaatagtaggcttggcacataatatatgttcattacatagttcaataataagggcagagagaaataggcaggtttggccccaggaatcccagtggctatcatctagccaagaaataaaactcaacgtgatgccagctcttacagatcctgcattcattctagttgttctcctcccactctagggtggggtggaaggcagtggtgtcagggaaaagaggagatgcagaggcaggaaagcacttccttggctggcaccgcagtggtctggcattgccactccctaggcatggcagatgtcctccttgccaggcaagttctgggctccccagagatgctctcaggaagaacattggaccaacctcagtgcagctggtcactcacatcagtccctccagcttttccactggacagcacccctcctgactctatctgttgcagttgccttatcttgggaagaaaggcctttgggcagggagccttgaaaaacacctccctcgacctcaggcccagactgactccctccttcccatatggcctcatctggtcttgagaaacagatctatctggccattgtggggagtatggcccaccagccagggaccagttctcaccaagacctgtcaccttcagtcttctcaggtatgggtcaaatgccagcccttctccattctaactgcagggggtggataccaagctctctagatgacaccctcaaagcagcttcagtaggttaaaaagtacagaaaaaagaattccacagccttccaacagctaccccaccccctccaccaccccaaagtagttttctctcacaatccttttcttacttttgatttcctggctacctccttggcagagtagtgccacacaggtgggagcttttggcacctgtacttttatttccagctggttggagagagtcctacttggtttgaaagggttctccagataattttgatatcaatgaactgttctaccccaccacttccctggcagctactccttcctgtgcactcccaaacagaaacaacttctggtactgactagccatgtgctttttaaagtgaggacccgaggtcttgagcctcctcctcctgacttcctcctggagtgatggctgacaatccaagctgctccgtgctgagggagtcggcttgcctgctcgttttcttctctccactctggccattctcaggatcatgttggcctgaagccaatgctcctgatgctctcgatcaaagccatcacctgagtggcactggagtaaaataggagaggaaacatccgagactatagtgttttcagagtgtcagccacttggtctttaaatggctctctgtgacccatgctggacaggaaatctcgatgtggaatcgtaaactaaatggttgggcttccctagcctcagggagtctcaggcccccatcagccctagcatatgcccagctaggccgaaaggttccaaaaatatagcaggctgcacaccttttccactcttgccaccattacagctggaggcaacaaggctgaaacacaaaagcccagagcagccctggccacaatttcattgtgaatataattctgacatctttaaaacctgactcattctaggcttgatgcttttggccacatataaatttccatgctgcattaatttgtctcaaaggactcgaacttagttgttcagaagtgaaacattaattcttaataaattctcaacccacaacccacaatttagtgaacttataaaagattagccctccccgtactaaaacattgataatttttttgttattaatcagaaaagaatgttggggaactctcctattttatgtaactaaactttcgaacaaagcaactgccttcaacagttagctaaatagaatagctctcttatagaaacagagactaggctgtaaatagatttgaaatttggtgggaatcctcagagccacctgctcctccccacctgggagagtcagtctgactgggagaggccacatagggaagctatagacaaattcaatgattccaacagttaaaagaagtgctcactagcctctcccacatccagaacattccaaatctgaaaggacaacatcccatgctgtgtactttgatttttgttaattaaaattgtttgttgcctatttttggctttaattttgggcctagttcaattcaatgcaggtgacaaaactgtgaattcagactcatgctagtttgcatagttgcattaaaaagtcgtagttccaggaagcctctggtcctctaatatcttgcatagggatacctttctaagaagggtaatacagagcagatccaggacagcgttggcttctgattacctccctccctcccttccttccttcctctttcccctcatactctctccatctgtctccttccttctccttccttcatttcatttttgtgtttcacaaaaagatgagtctactaatatcagcagaatgagacaaagccaaattctttacccaggtaagaaagacaaactttctgatatctatttagtaagtcttctacgcacatgggaaacctgtgttccttgtgcagctttgtgagtgctaagttactatttatccagttatcttggtacctttatgtagtcttggagggtagggatgtgtgtgtgcatgtgtgtgtgtgtgtgtgtacatttctgtgtaacaaggaggataaggctacaagaagagagaggacacctgtttgcttttgatgagaaaagagttccctgtgcctgatgatcaaataaagtatcttccagttctctgatttaaacaacatggcacagtctagaatatgagaagagtgcattagtgtttttctgcacaaaggaattgtgaaaatgatacatctcacagaaacatgtcctcaattcccttcgataaggacatcactactaaaaggcctcgtagaaggtagtggggaagtgtgcacataagcagtgtagtacgtattgtgagaaactaacattaatccggctcaaggacacagcaaaagggagcacacaatgacactcaggttttgtattgtctccctaaaattaaccagcaaggagaagactgcctataaagcatgtctctgcaaagcttcagtgcaaactggatccattcttccaggcaaaggagaggggaactgaatctgatcccactgcaagaaatactcactttgaaaggatggggctgggagactgacaatgcaaatcgggacaaagaggagaagcactgaagtctaaaggatgcaatgagctcaaagtgcagattacagaagaagttgtgaaggccttgtattaggtccctgtggcagccataaaaaatagccacgaacagaagcttattctcacatagttctgaaggccagaagttccaaaacaaggtgttagctgggcagtgcttcttccaaaggttctaggggagaatccatatcttgcctctttcggcttctggtggctccatgtcttcctgtggctgcatcactcctgtgtctgcttccatcttcatatggtcttctcatctgtgtgttttctccccttctgtgtcaaatctgtgtctgcctttttcttataagaacaattgtctttggatttagtgtctacctggatagtccaggatgatctcattttgagatctttaacttaattacatttgcaaagattttttttttttttctaaacaaggtcaatgtttgtaggttctaggggttaggatgtggctatatctttgggaggatacaattcaacccacttcaggccccaacaaggtagtagagcttagaggtgaggaatacagtgttagaagtcataggaaggcaagaagcaggtggtcgttcaagggaaagagggtcgttcaaggggaaggggaccacaaaaggggaaggagtaaaaggcaactgtgaagccttgctaggaacccagtcatcaactccgggtcatctgcccctcaggacttggagggtgacccactactaagccacaggatgttgaactgaagttaaggatctcttgtctcagtaaagatggattcaggaattaggacttgggggatacctgttggggcatatagcagacccattcttaaataatgccagataagaagtgggggtagccaaccctgatggacagacctggggctagccaagccccagggatctgttctggacccatttggatggaggtcaccctggcaggaatgaaggaggctcagcgcttgggacagcagtccatggaaagggccagactggctctgccaattaagagaacaaaaggcaagtgtcctcccccctctcatgtgcattctgtacctcagacactcccaggatttggggagttttacatttttcagatctgctcttgatcagtagctccaagaagaatagttgcctgacaggccaagaggactcccatgcatgaatcatacccttacattttgctcagctacctagaggtccaacccaggccctcattactagctccctggctagttggtcatgactgctactttctcaattaagttatttttagcccagtattccatggtctgagcgagatgttctgggccaggaaaagggtgtgacagatcgggctggaggttggctgtctcctgctggcttccagcctaaagttaatagggcaggaaaataaatttgtgcagtggaaagcatggccccatttcctcacacatgctcaacaaccactcaacatttcagggtagttgtggagtaaatttgcttatcaccaggctgatttgttccagaacgcatatttatttacttgcctgcatattgatttaaaagtcatgcccttcctatatcccaaaagaatatgaagtgacttccagacccccatgggacttcttggaaacccagaagactcattattcatttaggtgttacgtggccatcctgattgtacctccagtgttgcaggcaaagatagctaccctcattaagcagatgagcacatttttgacatttgaaagttaatcaaactcctctacttccttgaggagaagagctgcaaaatatatttcaggcatgtgtcacaatggtggtaggaacgtgtgaaatcgtttgcagccagataccctggagagcccaatggtcaaacagcaaacttctgtgactttagcagcctccacctccctgtgggcttcctccaatctgaccccagaccccactgaccccctaactgtcccttctcactcctggtgccaccattctccaccatccaacagtagcttaaagctaagggtcactctatacacaggctaaagtcaatttgagggccattagcctgcccaagtactggaaatcaccattcttctctatttaaaataatgtctctaaaaggcttattaaataaagtgcaaatgttacaatactatctatctaattattatggctcaattaattagatagctacatgttagtagggggaaaggatctaacttgttaggctttgattgataaggtagataggaatgtaggaagaaaagtgaataactggaaagagcatcaaatagcatcagggtctaaacagggtggcacactgttcaggggctatagtgagccaggaacaccataagggcaaattatttaacctcaccaagcttcagttgcctcatctacaaataaagatattaatagcaccattatataagataatctatgaaatatatttggcatgatgcctggcttgtaagagctgaaaaaaatcttacctgggaagttatcgctgaagttatattattattaataataataacaatgataatcattattagtagtagtaatagtagtggtggtgttaatgtgccctgttaagtggaatcaaggcattacattaaaggatagggaattaaataggaaagtgggggcaggggtgtcaattccagtccttatctatgtcacagctttccctgagattagctacaggagaagcaccctggcagagtgattttggagccaaatacacagggactcaaattttggctctgtcacttgataatgtataactttggggaagttactagttttccagagtctcggtgttcctatttgtaaaatgagaataatcatacctgtgtgaagactatccaaatagcatacacagagcatacaaaatgtacctagtgcccagcaaatatgtccccctccctcactggccaagctctttttccttcatactatggttggcagactgcaaaatgagaaatccatctggatgggtgagaaatatgagaatgcattgtgggctctttgttaagagaagaaagatgtcactagctcccttacaccctcctcccactgggggagctgatggaacgtacagtcgggttgctgaatgttcgaacttgcacccatatttaggtacagcatgtagtggaataattctgaattcactgtaatgtgctaccgcaaaatggaagccttccagtataaaggagtacaaaaataggttttcatggaaatttaactctcgttttctaccttaacacaaatgaaatctgagtacatttttttctgcaataaagctgaagataactttttaaaaagctataaatcgaatggctacaaatatctttccatcatcgctccaagatatttatcacttgatgtgagttatatggaagatacatcatctgtaatagtcaaaacaagtttaggaacccttctccattttaaatgttacttccttgatgaaaatctaatcacattggaaaataatcttcaaaatcatctcatttcttttctcaacattattgtttgaatgtctttattctttttctaaattcacagaatatacttcctctcatgcattaccataccctgtcccaataatttgttttctttaggtgttagactgtaagtaagtaagactataagaattttaacattttaagtatattttcaggaaactctctttctgatttatataactgtccatgacactgatatgcagtcattagttacttaaatgttttttataattatgtaaatcatgttgacagattctggtagggtgcttacactttactgttttgtcatctgcaaagttctgaaatgtatcagaaaaccatttacaaagtaaacagctgttaaggggcacttgctgacttgttgctttctttgcctgtgattctgggtccgttgtttttgccaggggctcttaagtaaatacaacctctcttcctctctccccacagactcttttttttttttgtcttaatgatgaacaacttatggtcattgactttgtggagttcagggtcagacagaggaataggtggtcaggtattggcctatagattattgtaatagaatgcggaagatacgtgttataataaagatttgaatagttgccataatagagcactaatttcccagatgagctagggaaatgactaatttcccagatgagctagggaaagctccacaaataaagggatctctaatctaggttttgaagtttcagtaggagtttgatgagtgaaaaagtggggaaaaaagcctcccgggcagatgcatagatagaggtatggttgaaaaagatgaacagttgtggatacccaggatatcagatgcaggaacccaagcattggccaatgagactgcagagctggggtcacagtggaaattatttgcaaaggtcttgaaagtctctctctctctctctctctctctctctctgacacacacacacacacacacacacacacacacctgtcttcattctataaaacaaactgatgggatccaacttttagaacataatgaacacggtatggaggacagacatgtgcatatcctgtccgctttaagaagcctagaaatggtacttatttcaaaatcatggaaaagaaaactatcttcctccatctcagttatgcttagttcaaacagaaaaacattcagttgttactgcgtggcccatgagggtaagagaaagataagtgcagtatgccaagtaatttttgagacatttgaaggaagcattttgatacccatgcagatcctccacttaacagccaagaaggtctgtgacccacctcatctctgccatattgatgcacggtgacatgatctcaccatacagtgctataaccatgcataggacatgatacactacacccctgccatgtcatgcatggtgacatggccctgctatactctgtgtggtacatagtctactacctctctgccacagcctcatgtgaagacatggtctgccatacctctgacaagtctacacatggggcatggcccatcaagtttctgcaacatccatgttttagggtggtgcgttagtgcattttatgttgctatagaggaatacctgagactaggtaatttataaagaaaaagaaagattcagttggctcacaattctgatgtctggaaaagttgaagtttgggcatatggtgacatcctcaggctgcttccactcatggtggaaggggcaggggagccagcatgtgcggagatcgtatggcaagagaggaagcaagagagaggggaggtgccagactctttttaacaatcagctgttgggggaattctcatgggaactaaaaaagcaaaaactcactcagtcccacccctcccaagggagccactaatctgttcatgagagatccacccccgtgacccaaacactggccattaggccccaccttcaacactggggatcaaatttcaacatgagatttaaagggatcagacatccaaacaataggaggtgggcgtggtccaccttaccctaagccacaaccaagtattgagctctgaggttgttcttcaccctattactgtccaggttacagaaacagtcaccaaaaggcgattgtggtagcggctgcaaatggggggaaaaggaggtgtgcaactcagattttagttagggtcgtgatgaaagatgttgatgaaggaacaataagagaggggtttaaaaatgggttaatacatggatgatatataaataaatgtatcataaatcatgagatgagagaagtaaataaaagcttccaaataagagagaaaaaaatacaagagagagaatttttttttaaataaggaagaagaataaagcaaaaaggaagacaaatcagagaaacagataacacaaaggggtaaacacagtggagtatatattttccatgggccatgatgtgcccatctcctcagtgtgggtacacagcagcggccctctagtaacaccccacactggcagccctgtgcatttaggccacccaaccacatctaacaggaggtaccatgcactcaaaaaaaatatatatatatataaaaaatatatataataaatatataaaaaatatatataatatataaaatatatataaaatatataatatatattatataaaaaatatatattatatataatatataaaatatataatatatattatataaaaatatatattatatataatataaaatatataatatatattatatataatatataaaatatataatatatattatatattatatatataatatatattatatataatatataaaatatataatatatattatatataatatatattatatataataaatatataaaatatatataataaatatatatagtatcttttctcaagatactatttatcttctccacatgcttttgaatgttcttgataagtagagatgtagaaggaaaaatgagaatctgagcccctgaagagaatatctcctccttttcattcttctcagaccatttgcttaagtgtgtagggttttaggttgggcaaatctaacccatgtgcaaagtactatttggtctgaagacacacctatctgcagctcatggcttcatcctgggggggtgggggtgggagtggaaaaatatcacattttctaaatcttaaggaaatagagtagaaaatttgttgtaagcgcaagtctccaaaattattttggccataagctttatgggacactccatgaaagtgtctcccatccctagtcctggttacatagtttcaggagacagatctcccatggaaaatgtgatgcttcaggcagactggagggtcagatgtatttagaatgggttttgtacatcctcatccagcagtgatggaaaacagcagacactttcccttctctctcaattgcataggcccgcagaggcctgcaattagtaagggggcagcccattcatcagcaccacacaggggcaatcatccaaatcatccagttaaacagcagttacttctcttcaagacacaatgcttcttcctgctcagccccagaaacacgagtgtgcaccggaaccaagggagagcccacagccaaacaccactgggaagaaaaggaggccatcatgcgcccatctcctcggtgtgggtacacggcggcggtcctctaataacaccccacatgggcagccctgtgcagataggccacccaaccacatccaacaagaggtaccatgcactcagaaagccgctaacataccaagccccttattttcagcctagggtgtactagtgataacttttcacgaatcaggaggccaacatgaagtcatattatttcagtagggaaactgacttctactcccatgttccaatacaagaaaacataagaaagaacggtcaattccaaaaatttagaagacaagcaggtacatgagaactttgagtatggctgagaacaggattgagggaaagacgggagatttcaaatgagtctcttacctttttgtcgctcaggccagaaacctggtccacatattcctcttggatcatgaaggcagctaagttggcagtgtagctggccaggaagatgacagcaaagaaggcccacactgacaccatgatcttggaggtggtcccctttgggttctgcacaggtacggagttgttaaacaccagaccccagagcaaccaaatagctttgccgatggtgaaagagggtccaccaggctctggcatgacaaaaagacaaggacgaaagttaagccattgtggctggttctgttgaaacctacaaatacacagggtgagtccctgctcagagcaggaaacccttccgctaaaaccaagcccttttatagacggcttttaaatttgagagtgtgtatctctcttttccagggactctcaggagggctgcagagggttccttaggagaaaaaccagaagcccggagtgtgtgtaggatggtctttcttgaactaacagtcatgactcccctctggaggagccatcaacctgcccccatatacaagaccctctcaagattacatcaaaactgagtaaaacaggccaactatgtcactatggtcacacttgggtcatgtctgtcattttttcctaaattttatatttgtatctaccaagaatgcattttaacttccaaaaacatcagcaagaactgggtaagattgttttctgccattcataaaccctctccaagtctgtttatactgatgctagatggcttagaatgcactttttcctgatttttctttagcttctagcacttagcactcaatgtttcaaagacaaccctgatcctactccgatgccaacacttcccaactggtttcctgtcatagaagcttgcgtgtaaaagaatatcagaggccaggcatggtggctcacgcctgtaatcccagcactttgggaggccgaggtgggcggatcacgaggtcaggagatcgagaccatcctggctaacacggtgaaaccccgtctctactaaaaagacaaaaaattagctgggcgtggtggcgggcgcctgtagtcccagctattcgggagcctgaggcaggagaatggtgtgaacccgggaggcggagcttgcagtgagctgagatcgcgccactgcactccagcctgggcaacagagcaagactctgtctcaaaaaaaaaaaaaaaagaatatcaggaaggccaaaggggaagtcatagaatcctggcctggctacctgcatctaaggggagaaaggaagctgcttttgactttgatttccccccacctaacctttgcatagacagtgcttgggcttctgcccatgtatgtattgtgacctcactgcaatctctatttgctgatggtaaaatcttgcctgttgtctgaatctccatgtagcccctccactgcagaaatgaacatctgcctgcacagttttacaacatatttgcacaggtcttatgatgtaatctgtgatcctgatagcatctgctcagccaaataaatcatcagggacaactcatgttgaacctgatatgtaactgtgcacacacatctgtgcgtgtggaccttatttcatgcaacagatgtgtaactaaaacgttgtttataaatcaaagctttataaattgtaaaatgctctaaggagacttgatatttaaagtggccccatgttgaattcctctgtgaagacaaacatcctttggtaaagtgagtaattgtaagccctcgctctgagctttctttgcaaatctggattttcggctcctgttattttttcaagggagagaggcaatgcacactgactttagctcttgacattgccaacctaagtatatactcatgtgattcccagatgttccacttctcactggtgccacacaggctgggatataggtcatggcttctggatgaagcacaggtggaaggcccctgattgtaccatgccatggagacaccccaactcccacctcagaatacacaaaccaaattaaaaggtaggtctgcacttggaaatacttcagtaaagtgttgtttcacagcttagactgtgaatccaacagaagcatgaggaagattttataaaatactgctgcctgaaaccctatactcagagattcttattaaattggtgtagggtggggctggttattttaacatgcaaccaacgtagagaaacactattttgaaacatacagtggtctaagccccaacctagacttagtgaatcagaaaatgaggtccaagcacctgtgtcttttagatgccccatagatcattcttatgtgtagccaggtttaagaatcttccctcttggaggtttaattctaggatagagctcacattctggaatggagaagactcagagaaggcagaatatttcttaatcctggggttctcaggaagttttagaggagttatttacaaggatcccatggtcccctttagaaatcatgtgaacttttaaaaactgtcataaatgcctcaaacacatgggcagccctcacatctctaggtctacctacccaggaaattggaccatacccaataatagctatgagtgagaattggtctttcccattcattttatttccaacacccaacttttatactctcgggcaagggggttgaaccaggggcatatgctttggagatctggtacctcagttgtgatcctttggcactggggaactcaaccagccacaaccacctgcatatatcctggggcaatccatttcttcttgttcttaacatgtgtgtacaatctgccttgttagcgacatctgttccaacagactgcccacagcctaaggttatcaaaatagtttcctgtgacatgtttatgctatacccatatctaccaatagtttttcctctcctttacttgggagtgaaactaggcttggggccaggcataaagcagacctatagattcaaactaacatcttaactggggtatttctaaagagacgccaagctggtgacttagaaatgttcacctgagggttccttttcagaaatggatatgctagggaaaatgcagataacaaatgaggagtccagagatttgaaaataaggagaaaaaaactggggaagtgcagcggttccagccggccttacctctgccatcagcgaggcacctgttataacccacagggctgaagtactcaaagacaaagacagccacggctgagacgatgagcagcatcacaaacatcatcacccatacgtcagcgctgaatggctctgaggaagggaaaaaagcagtgctcagggttagaacagagagcaaaagaattcgaattaattcacatattcatttcatattttagggggtggggaacaaaccacaatgtgttgtctgccttcaggaagccagggcctaggttagattgtactgaaccatttccttaaaggtcaaggattgccttccttcaaatacatgagaaggacagcttcatgcccgtgagcctcttaggttgtagaggcagcttctgccattattggaccaatatctgggtatttcagtaaatggtgcaattggaagaagcactagctatgaagtgagtgagttgtattggactgactcaatttatgttctcatctatatggccacaccatgtaatggaggcctggaaatgccttctccaatgcttctgaaccttgcagatacagtctttctcaacagacctacctactattttagagttgaatttgttcaggaataattatgtacaataaataaccagcccccttttccccttgtatcatttctcttaaacttcctagcctagattcactttttcaacctactttgatgtattgtatgttatcagacatcattagggtatgagaatataagtcaatgttaaagtatccttccacgttaaatattattatctgcaacagtgggaatttaacaagtgacaagggaacatgtctaagctgtaattcacaaaccaactacaatctatcccccattatgaagtgatagggttgatgggacaagactgggcaaggtagcaagaatgttccacatatgctttctttaatatctttaatcatgtgtgctgaatcctttccaattgagctaaatatctctctggcttggaggtgtccagaaactagatactatattccagaagccatctctgtaaaggcctataaaaagggacaatcactattctgtcccatgatacaatgctccctcaattgtgtctcaaaatagttctggcctttttagctgtcacagcacattgtaaactcataactaagtgaattaacatgctgttttctccatcttccaaatcattaataaagatgaagtttaaaaaggggaaaaattggctgaaaattagaaaatatatttcttactctgaaacctactttgttattgaactcccaaaggaattgtaaaagcctggtcacttaatcaatttttaaaagatcttgataaagccccagtgcttaacacaccaactgtgaaatgcaaaacctttcaatggcagctagagatgcgagcgtaagaggtacaattcaaaggctctctccagaggtgtggagaaaacctctgcacacttgactctaattgattgcaattctaccctgatttcccttttgtctaagattggggaataactgagtaaaagcaccacctctgtggtcttttcctcccattaggcccagggaaactttctatacacaaaatacatcgtctgttttggtctttacaatttagaaactacttttaccacatactatatatataatccttctaatggccctttcattagggattaccttatctattttatggaggagtaaactaggactgagaggtcaaggttctttccaattcatactcagaaagtgtcagggtcagcttacaaactgagccaaaaagtctgtgttttttcattgtattacattgctctttgtccccccatgctggttcctgggttaggggctgaactctgaaacggccttatttgtactagaacacaggttctgaaggctaccatagctggattttaatcctagagctgccagttatcagctaagagacggctggaaaatggcttaataggtctaagattcagtttcctaagctataaaatgggtataataacattttatgagttaatataaccaaaggatgtacaatgatgcctggcacattatatagtaggtgctcaataaatgttggcttctcttatccctataactaactgctcctcctctgaatacagacgtaaacacaccctgcctgacatttctatgctattccagggatatattaatgtaccactggctctgccagttcagaagttaaggtagtgctatactgacaaggttagaattagaatgtggttttgtttatatctcttaatgttccaactatccttgcacagcaaaaaaaaaaaaaaaaaaaaaagcaaataaaatatgtatagaagctatgagaattactggatacagtgtgtactatctaatcacatttcacataaaattggcaaggctggaatttgcttcactctgagtaagaagattagctaagaaatttgagtaatttatagaaaaattctatggagcctataactccactttgcaatgcattaattgaattaattccctatggttagagcttaaagaaatgttagtcactgtctactgtaatagccccatttaaaaaatgttgatgtgccttagagagacggtgactcgtccaggggcttacagcttgtttatgccaaacccagtctcctttctgctagcccagtgttctgttttcaaggtgacgttttattttccaacccctcattccatggcccctgcaaaaaatatggggtatgagctcacaaaagacctcatctaattgaaatcttggcctcatctcacccagtcttatatcacgtctgagatttttgacatttaagtgatgctggagagaatggtatggggaggggtgcagtggggtgggaggaagaatcagatcagctctatctggcaaagcctcagaaaatttgcgtggaaacaaaaaatcttttttggtagctctgagcgcaattcttgcagataattaaaaataaatagatatttcaatgatatccagaattagaaattattatggcaagaagcagtctcagagatcagcctggttgaaatgacttctcctatggatgaggaaaccaagtccccagatacagcaaatttgctcaaggtcacatgctgactaaatggcaggaatgggactacagtaagccctctgaggaccagcccagtactactttcttagatggcattatgctttcctatttttctgggtgttcatcagctttcatgtttgagagtaattgattttgaagtcccctaagtgaagtccctggctgagttgagctcctagcaaaccaccttctagctggaacagcctggccatgtgctccttttttccttatttcacttccccatccatacgtccatttccttccaccagcaaacccatcatttacctaagaaggcagaaggtgagacagtcccattgctgcgtgacaccatgacactgatgcctgtctctatgaagggcacagagaagtcgaccacctccgatcgttcctcattgatggtgagtgagcccactgccatgtaggccctcttcatgaccacctaaaagaaaggcgcgatgctccaattaaaacattcaggagggcaagggaccaccacaaggaaaatacagcctatcagtggttttctttgtatagtgggaacaatacatcttatttgccattttatattttctgaaatgcataaagtgagcacgttttaaacttatatttagaagaaggaaaataaatgaaaatggaaatggaaacagcccttgtggacactcacctctccaatcataccattccaggttccattgattttcttcccatgcttgccattggtaaccaggtaaaggtcataggtgaacttcacagatttagaaattttcttaaggatgtcaatacagaaccccttgcagcattttttgatgtaacccggctcctcgtctgttttattcctagccaattaaagaaacaaaaacaaacaaacaaaaaagtctttgtacaaaaagccaacatttattaccctttgccattaaaaaacctccaatcccaaagcaggcccccttcacagctcagcacaatttatactagactcgagtgaagaaataaagcaggcaacagacctgcaatattctcattatctcgtcatattgagatatgtttcctcttaattttaattctcctttgaagtacaaaatacataagaaaagggtgcatatttgaaggcttcagttcaatgacttttcagactgaactcttattaatcagcacccggatccagatacagaaaagttaccagtaccagagaggcctcttgtttcccactctaggcacttcacaccaaggagaaccattatcctgacttttaaaagcatagattagttttatatttttcaaaaaatggttctaaatctcaagattctgggacatgctggcccaagaaaacatatttgaacaccagaagtaaacttaaatctccataaacttgaggtcctaatcattaaggccaagcaagaccgaagaaactttagcgtgggaagttggccatcattttcccaggtcaccagctggacagaacgagacatcagaccagagggctgccagtaatcccacagctcaaaagcaactagaaatcagacacagtgcccaattctcatgcctcaggtctcaggccagccaagtgctaacaggtgcatcaaagctgactctcccatgccacccaaagtcattgagaggatgccatactcagtgactatgcgtttttggcaggggactgtgttcctcatgcaggttccactcagagggtccacactttccacaatgacaaatggtgcctcctccagggtcacaatgctcagatggtcatcctcctgctcttcagtctctggacacattcggggccacacatagtacttcatctgcagggacttgtctttccacttccccacctgcacaaggatgaacacaagaatcagaaaccactggccacaacataacaaacagcctgtcccagtattgtctgaacaatcccaggaagcagttgaacaaaagccaacaagtgccaacattgtacatactagagataggaatactttttaaatcatgtgccccaaatgagactactgtgtccaaatgtaagaaaggcaatacattcatttatcactcacttaccaaacattaaatgaggacctactatgtgctggcaccctgttaagacccatggctcaaagaagcatcattctatccttcatgaagctcacagtgagtggagtcagatatgtaaacaaatatcttgcagcgctgtgtagtaagtgaggatgctggagttcccgcattatgtgtggctgccagttttttctatttaactgtaacaaggagcatgatggtgagagcagcagatagctttggaaatgtcaacagaacaatgggagcaaatgagccaaaatgatgtgttttggctgtagaagagatccagtggggagagctaggtggatctaaattggaataaaattacaaattgggattaaagaatactaacactgtttgggaagggagcacagttaggctggggatgaacatgggtcaatgcagatgtgcacctcctgggctgggtggaagccctgggatgaatcagatatgtctctctgtgagccaccacctatggccacacaggctgagtgccccaacaccatggagcaccatccacatgggctccaatgtgaaaggccagtgtccctgaatcatgaacatggcggcctgctggcaaccatcctgagaaatgtatgggttccattatttttcagaagagccactcattcctatttataagggaatcaacatggctttgttggggggttctcattctctctgtctcattgagtttaatggagaaagagggaacacttgcttattttctataactgagcatcttcaattatcgtaaggaattatggattgcaagcacctgcattttctcaatctatgatttcctccatgcagcaatgcaaattagtagaacaggtgaggcaccaggaactacagcaccacttaatttattaactacagaaatcaataagaagcaacaagttggtaggacttcataaattttcaagcaaatcggcttggatttccatattaatgcaaaacccagactccctccttcttggtttctttgtccagtagcctgcatagccactgcccttgtgttactgcatcattataatgcaggcagtggcttggtggcataggctatcttatttggtacctacacagtccttgtttggctgatgctggttggttttctttcaagggtataaatgatgttttgcttctttgttcagaatcatgcactgaaccaaacgtttgctttccttcatgtgtataggcttctctgaactgttgatcctgattttagaacaagtccgttttttctcatattgctaagactacttatttctaaaacagaaatttccaaatggctctccagccagtggagatactaatgtcctctgccagtttggccaggtaggaattgggagaggagagactcagtcctgggggtccaggacattggtcaccccctccccaaataggcctatttaccctagtggccaaactggtttatattctgcaccttcaataatgtgtaaaaagttgagaagccctaaagtacttatttatttatttatttcctatcatcttccctcaacagtcccttttgattttttttctcttaaatccaaatttattcttttccatctttattgctactagcctggcctattatagcccagcggcccattctgacattattgcaggaaatttcaaacctcactaagggtccccccagagtccattgtggacactgctgccagatggctttcttaaaacacaattttgtcatataatcctgattcaaaaatttcaacaatctctcactgtcctcagaattgtgcccaaatttctcacctagatagtcaaggtctgtacattgagtctagcctaccttgatacagttaacttcactattttacatcatgaatccttagttcaacttggaaaaggaagttgttggtattaagagctaacatggattaatcaggaacactttgcaacgaactagctgcattttcttttctaatagacttactatatctgtgggaaaaaatgctacagacataacattttggcagagtttctcagatactattgtgaacaataaggatattgcacactttgatagatttgaaaggagtttaaaatctgtacccaaaaaggaaaaaaaagagattgtttaatgaatgactgccaacatagaaaaaagtcactagtgtcatatcaggggactctgttcttagaagcggcctgggtagtcttttagaaaacaaaatacaagtcatgcttacaaaattgcagacaacagaaaactagataggaggaaagataaactgcattgcagaatcaagtttggaggagatatgaattagttggaatgatgaactgaaccaaactgaatgaaatgtaacagtatttgtactcaaaatctagcattttgatgttttaaaaagcaattgcacagtatcaaaaatgagatatttcaatcagcagtctacaaaagctattgcaataacaatggtatatttatagacatacatcatctagcatatggggtgaagggaaggtacgaatgatcctaccttgctctgtgttcatcataccacagctggaaaactgggttctgatcctataattctataatctactgatttttattaaatatatcattctcatttccccaacagtagtttgttcacgcagttccctctatcacaccctttcccaacttctaccaagttagctgggtaatatccttacttcaagtccattcatttcaaccaccaaccactgcaaaccgattctgtgccaggcactgggctatgtgctagaggtaacaataccaggtagcatttgttgagggtatagatgtgctaggcactgaccatatctagtaatctcattatatcacagtgagcctgtgagattgaagctcacatttaatgtttcattttacagatggctacagaggagtttgatgacttgcccaagctcccacggtaagtgacttgaagctgagcagtctgactccagagcttggactcctacccaccactctgcactgcttctctgacaatgaaggagtaagacatgttccttttcctccaaggacagtctagagggaaaagacactatccatcgacaataataggctttggtaattactctaatatccactatccattgacaagttaggctttggtaattactgtaataaaagatataaataaagtactccggcattcagagtagaagtgatgttttctaaaagaatcagaagaaatctcacagagaccctcattttgagctgtggcttgaaacgtaaatgatagctgaggaggtaagagttatttatctgccaaggaaagggcaagagtgagggaacagagtggtgcagaggctaaatgaaaatggcttatttttcacacctgtaaggtctgaggcatggggagcaattgtctagcacagttctcttccttacgggcctgctcactgtagccggatgatctctgccaatcttgagagctgactggattgtgctcatctcttcccaactccttgttcaagggtgtcaggctggtagcttgaaactggcatgggcaccgtgaagttggcaaacactatcaatcaggctccctctgtccagccctggcccctgttgttaaacgtcaaccagctcaccactgcccagaacccaatcattcatcatttcatggtatctaccaccttctttaatgattttttaaatgttccaagtgattgtcttaattaaaataattctaaacatgtctctgagtatttctgagactgtaaacacatttctaaaacactgtgagcctcagtttctgcatctgtaaaaataggtgtgtggcattctgaggtgccttccacataatttcatgatcataatttctttaggacaggggctttctacatcctacaaattaaagcacgatgaagaggtgcttttagaggttactttttgaaggggtggcagtatctgatttgtttctacaaaatacgagcttgccttaaagtcgttatttttttttttcgtttcttcaaggaaatgaaaaaaaaataagagggaaagttaaattccttgagtactgaaaggtgaaacttttttgaaaaaaaaaatctgaatatcagattcccaattccaacaaacagggttcatgttaaagaacatgtttagatagtcactgccaattctttatggagcaaaggcaggttacaaatgagtaaacaactaaaattaacaaaaaaggaaacaaaaattatgtagaagaacaaggtgtatttcaagcaatctttctctcaagggggagaaagtatggtgaaaaatataaatggaaaagtttgaaagagcaatgaaaaatagtaaatagagaaagagaagccggagacaccaagcaaacatcttgaaagtgcatccaggatgtccgaagtggtgtgagtctacaatcctagaagtgcagacagcggtagaacatgaggctaacaggagatatttcagagacaatgtagcgagaagaactgaatgaagaatttatgcttgagattaaaatatgatcaggaaaataaaaaaccttaagaaataatgaagaaaatgactgtaaagcactcagaattcctttgaggtaactaaacaaacatcattaccataagcacatttcacaacatctgtctacaaaaaattcagttatctgccattctaacatttaaaaagatctcttgaggaccaaaatcatctttttcaagagaaaaaaaaaattgcctagtttttgtttttttttttttttttttttttttttcagaaaaacagtgatgttttagagtttctggtttggttctcttggtacaggctgaacacctgaatagctgggaatttctcctcagaaggaaagtctaccttacaaacctgtggtaccttcgagtggacttggctcataaggcttcccgtaggaaaattctagggaactaatctgtaatgcttttagacttcaaagtcttccttctgctaacagattcctccattactgccagtgaaattggcaccaattagcaccctgacaaggccacacattaaaaagaccacagagactgtgttcctctctgaaagcccccacgtttgtccccccaccatgaacagttgatgtgagcagaagggcgaatgtgtcattgtgaagaagggagaggggaccagggcagggtattgaggctgctgcagtccttgcatagattagcaaaggacatcggtctcctcgggctgcctctcttgtctgcatagaaagtcattttttaagattctggagcaaaaacacttattagagcctctttaggcgtcaaaggttatttttcaaaaatcaaagcatttttgttttttgcttgagatgacatctggatgtaacatgaaacacttgctgcttattttaagccttcatctgacttttaaaatgtgaaacttaaagctacatgctatttccctgagcaagctaaaggaagaggcagagtctctgcaaggcagcctaaattctgcatcccattctgtcctgcagccccggggcaggcctcagactctgaatagagcagaaatccgaggacaggaggacaccctcacttccccacccccaaagctatacatcttaactcaactctgaggatttttaatgtttgagtatatgataatacttcattttgctcaatctttgtttttctctatttacctatctttaatttgttttctgctactataaaaaaaaacacacagactgggtaatttatttttttttaaatgtatccctcacacttctagaggctgggaagtccaatataaaggtgctggcatctggcaagggccttcttgctgcatcatcccacgcagaaggcagaagggcaggagagtatgtgtgagagagagagcaggagagagccaagctcacttttataacaaattcactctctcaataaccaacccactactttgataatgtcattcattcactcatgagggcagagcctcaggacctaattgcctctaaaaggtcccacctctcaacaacgttgcattgaagattaagtttccaacttaatgaactttgggggacacattcaaactacagcactacctctccccctcatttctttgtaaccaagtgaacattctaacactgtatggccctgcattatctgtatccgttcaaaatacatctacatatatacaaagaaggggatttgtgtgacttggtatgtatgcgtgtttcctaaatcaaatcataatacacacatttctctaccacttacttttcccacttcagtgtggaatttcttccaacagtagatctaacttcttttaagaactgcatagtagcctataataatgaatgtgcctttatttactcaagcatagccctattgatatttatgatatttccaaaaaattaaccagaagacataatacatatcttggtatttctaaggcatcaattcccagaaatgaaaaggcggaacaaaaggatatgtatgtttttaaatgttctcaatggtgccagaatacaacagtttgcaacaattgaaattcctatcagcaaagcacaagagcgcatcctgctcacactctcaccagcactaagtttttatcactactaaatgcttgccaatctgaggaatgaaacacaatatcttcctgctctaattttcatctccttgcctcacagtgagcgcaagcacctttccacatctcttagccatttaaattttcctcttttaccatctagtcacatcttttatccattttctattgagttgtttgtctttcttatccattcatagagaagagctcctggtgtagtatgatagtaacccttcatctctcaggtatgcttgaaatattgttcccactctgagatttgtcttctgactggtctttttttctgtgcacaaaattttactgtttttcttttgcagtagaacataatattcttcttaaatggagggttggtttcctacctaacttgtaaaacaatctaccccattcccaaagtgttcttctttggtattagtatacttttgcatgtagcttttcctatactacatgtgacagagatgccgttttgctttctgttgttgcacatgaccttcccctgcctgcaggtctgtccccttgccatgtttcaggaatgttctgcattctccttggcccttctcagacctctccactgccatgatactgtccctgatcaccccagcccagagaaagagctttcttatttgatctcctgtaataattttgtgggtcaacctctccctttggctatcatattaaaatgttagctgtatttcaaaattcatatctctgaactggtccttaagcccttcgagggcagggactatattagattgccttttttttgtcccttgtactggcatgaataacaactatgttctcagtaaattattgactgatgtcactgcacaccctccacaaagcctccactagatctccctccagtgttctttcttccatgaaaaggatgtaagatgtaaagcctgcttcattctgtttctcttcagccttcctgattataaagttaccctggacagactcagttctatgtgaatggctctaagtgcaatggcacaatctgctgcagtatctaaaaaggccactggcatggctttgatgcttcttctcctaattatttgcatattcagtgccatctaggtttagaaatctagtttttgaaaagtgtgcttggaaataatttccatatttaaatttgatccatgactgcctttggcctatgactgcctcttcacttactaagctggggaccggtgtctctgggtacacacgctgaagggaagcccatccagccaatcctgtctggcacctgcatggctctcccagggacactgagacatccattgccatctcgggcctcagatgctatccctggctgagccctgcctctccaagagagcccaggccccctcagcgctgtgtgtacccattgttgctgctaggcactgccctctgagtgactcttcttcgctgcttatcctccttccatctttcctactctggagagtgaaggaatgggaaaatgggggaggtagagcagactcacctgccaggaatagaagttgttgattctctcagcaccagagagctgttatggtcatttcagataacaccacgggtggagatgtgatcatattagagtaattagagccattagggaccaggctgagggccaggcacttcttgtggaggtctatcaattcaatgccactaaaaaaggtggatattattaattgcctacaatatagaccaaaaaacccaaggctcattgacggaccagaattttgtctctgatttgtttgactctagcagctcatatttttttcaccacgctatgttaccaagagaatatttatgacctctatattccttgcaaacttactgtgatctaagagagtagaagagtctgtttcagctcaccctagtctcccaagatccctgatggttgtgtctaaaggattcatggcaagtggcgaccgaagttcacaatgggggccagataggcagaatggtggctggtggcagtgggaggcagggtactgacaagctgtgtgaccttgcatgaattatttaatctctctgtgccgggctcattagttttctgcaagtatttgctattttttcctcctccttctcattataactattactactacaattgaaaacatcagtgcagctccttaatgtgacttcctcccagaaacataattttttgtgcaagtggcttgcaattgtcaagggggaaatactgaacaaattctacttcccaagcttttaactcaattttttccaaacatcagggcgaactctatgaggttcttttggtttcattcattattttcattcacgtgcaaataaaaacagaaatcacaggaataaaaatgccagtacccttctgaatttacccaaggtcttgaatccaaagagtcccattgagcgaggtggtgcctcgtcataaacccctccctgggacaagatgccattttagaaaagggcattaattcttttaggtcagagaattttgtaaacagtttgctaaacaggctcaaataggtggaaagattcaacaggatttcctgaagtatctaatgcctcttggctcaagggctcaaaaactcccaagccacaactctccatccttgggaagccataatcctcagagtcctattcttagacttataggagctcaatcagtgagaaccgagctctaccttctcctttgatgtgccttcctccaatgaagacctgtcttctggaacaacaaaactgggtcccaaaccatcttctgggacatgcaggacacagtgaggaaccactcaaacagaccactccctctaaatcaacttcttcctggacatgtgtgcaccatgcccaaggccttggcttgctccagaacacagctcagcagcgatgctgaactgctgactgaaaatgatgggtgggttctagggatgctgttataatctgcttttgggaactgggccacaggctgcaatcactgatactgcttgtcatcaggttaccttgtcattactctctacctttattctcaaatgacagttgtgagggtagagcaaaagtgtgtaatgttggacaattctgaactgtgactctctggatttgagcactgacttggcaaggtcttcattagtactcaggcaaatatgtatgtatgtgtatgtgaactcattcattcaccctactttattctaatttgtcatattagtaaggaacatagactttgaagtcagaaatgcccaatttgaatccttgcttttccatcattggttgcatgtgattctggatgagttccttaatctttttaaccctgtgttgtagatggctactgttgagctaccaaccagccatccctacctctccttctgactcactctccccccctcccccccaccctcccccctcccccctcaccatagctctttatctcctcctcttgtgaactgccccttcctcaactccacccatgtgatcctgtggaggttgccattttattccacctcctggtctactcactgacccagccatagctgagaggttgaagggtggggcacctgactggctgggtcgaatcctcgggatttttggtaggacccaggagaatgttaagtcagtctcaatctagtggcataagctataatatgtaaaattcagaagccctgggcagccatgttttgtagcctatggagaaactgacctatggaaggagagaagaatgaaggcagaagctactgaaaagtaaatacaagtgagagtatgagcaagatatatgacagcatcagagtcccggtttatggctattctgggggctcaaccacattcccattgtgagttctgttgagatgatccagtatcctatcatacagttgtcttttgcttaagctggttcaagttgggtgtctattctttataatcaaaacagttctcataatgtactgtgtatttcattcataaatggcaatataactatctttgtggggttctgatgaaaattaaataaaataatgtacataaagtgctttgcaaagtgcctggagcatggtgagccctgagtaaatgacagtggttgtggtggcagtagtgacatttatcatcgccaatttctgtcaacatctcagaagccaagaagtaagttgggttgcaagtgacaggcagattcctcagccatttccaaacaagtgtctctccaaaggaagaagcagcagggggcctccactcaagctctttgagtcttgggttcaggcagggccaatcggctagagttcctgttgtttggttagtgacctgtggctgcattctcttcctggccctcaggccttgtgggggtgcttggacagccacagagtctacagtcacagccaaacgcactcagcaggtcacttggcatctcttaccacctggcccatgtgccagaccctgctgctaggtgcagtcatttgcatgccttccgtctcctcttctattccccatgcactccttctacaagacccttcccaggattaagagctcataaccagaagggtcctttaagactccccacttaggggttcccaaaccaagtaagtggcagaaacaggatttgaacacaggcagtctgacaccaaaggctttgttttttaccactcctctatgccacaaatattaatattatgtgccataaggcacataaaatgcagagaacagtatcaggcatgtcataataatgtctaataaatgatgctgatctagaatacccacctgtcctattctccttggcagttctgtgtgccttgggcctgccatagcattagatggtctaggggcccaaagaagcaggaggatgaaagacactgagtggaaacagcgccaccatgcagaaggcaccaggttgttgcagaagacccctgggagtcagaaatgattatactggtcttcaaacaaggcttactggactggtccccagcttgctctaccccttgcctcctgatcagtctcattacaccctcttcatgatccttctctgaatttcaagtgttttcaatatgtttaaagaaaagtttacttgaaaatatgcaggaatctactgatagatcttagacatactaaactaacccctctcagatatagctcaggacactaatgaaaagtgatgcaaatcattgcacatttagtaaaccaatcaaacaagcaaaattggttctcaagcaaatttctttggagctagaacatgtagctggactagagcaggacatcatcagatgagactgcagagagctgcttttatcactgcagggtgcccatacagaagtatcagaaagaaagtaatgagaagcattctggaaaagggacatattgcataagtataatgacaatattttccagaccacaaatctgaatgtaaacactgataattatgaatgtgctttctgggacaatgaagcaatgtagttgaaagtgtgatcatccaggaaattcaagacataaggttgtgaatacatatgaaaagaaacaaggtataaacattaaagagacacataagaattactgaggcaatgagggagcacaaatggaagaggtcaaagtcatttaaaatacattataattttagaagcctagaccacaaagaaaaaaaaaggcttgaaggatctgtgtctaagaatgtacttactgttctctctaaggtgacctgtcaaattcatagaacagtttcctcacacctcaccagggccatccaaaacaagactaaatacttaacaataacactcactctaagattgcccagggtcgaccactcttctagacaataacggtcaatttggtagataagaatatctgtaaagagtgaagaaaatagttttttgtcagatattctagactataggctcccaaactaggatatccaaggtcattgcatctctcacggaaatgcttttcttcagctgtggagggtggaaatagaaaggatcctaccttgacttccattcacagatactctccctcttgcctggatttctgcattactcctaatggtttccccacctccattcatgctccacttggcccccagagtgattgctctaaactgcacatctgactgcatccttacccttctcaaaggctgtcagggcctcctcattcacctatagaataatatctaactttggaaaattacacatttattccccacgtttcaccctttctcctttcccttcctctttccctccttccctcctcttgctcctccttctcctctttctttacttttctctccctctctcttttcctctctctctcttgcctccctgcctttgtttcttttttggcttatctcttcagattcctagccttttaatttcatttgataacacagaatgctctttcttatctgaatgtctttactcatgccaaaatcctctattttaaacccctggtcttctgaatgacacagctcttcccttaggattcggctcagtagcatctatgccaagaagtgtttccttaccacaccccttggctggactaaggggttaggtatccttcctttgtactgccaaaataccgtgtgcatatctcggcctcacaacttgccatgatatcttatatctaactgcttatgtgtctggtctcctccagtagactatgagttcctcaatggcagggactgaatattatcattttcttttatccccaatacctagcataaggaagattaccacggtaagcactaaataaatgttagctaaacacataacagcaagatttcaaaaggggaacctgctcctggcagctaataatagataatgatgattctaccaatactagctaatatttattgagcatttggtatgtcagaggtgatgctgagcaaaacacatgcagtatgaaatttaattttcagaatagtcttataaggtagatattatttttatatccatttatggtagattcttatattagtggtaactaaatgaatcagatatcccagtattcatgcccttttccaatcatttctcacactgactctgagtttagctttgtgacttgctttgcccaataggatatcgaaaaatgtgacacatgtagagacttggatgagcgatagtcagtgggtcttgtcttgtcctcttggaatgttgctgacaatgctgaaaaaacttgggccagcctccttgaggacaaccaaacgtagaatgaggctcatctgatccccagtaccaacactagacccacaaattaggccattttggatggttcagccttggtagactcatcagataagtgaccccctggagaccaacccaaaaaccactaattcaaacttattctaattcaaactgctgacccaaagaaggctgagtaataaaatgatggctgtttcaggccactaagtttcgaggtggttgttacacagcaatattctcacactgctaaaaagtactaccttacactgggtaatttataaagaaaggaggtttaattgattcataattctgcatggctgaggaggccccaggaaactcaaaatcatggtggaaagcgaaggggaagtaaggcacatcttacgtggcagcaggagagagagatcaggagcgggtaactgtcaaacacttttaccaccagatctcatgagaactccctcactatcatgagaacagcatgggaagccacccccatgatccaatcacctcccaccaggtccctccccaacacatggggattacaatttgagatgagatttggttggcaacgcagagccaaaccatatcaggtgctctcagtatatcttgtgcaactttttcctcccagtgtttataatctagtctcacatcctccactgaagggcaggcggatatctggtctcaaagcaagagattttcgccaagagcatgaagacctggccaagccctgtctgtgactgcccatgggatgttggcacataaacttgcagagactgattctctaactgtaaaatatgagggtaaaaacatttgccaaaataccctcatataggtttgagagaaactaaggtgaaaatatttgtggaagtgccttgaaactagctactccctggacaaaggcaaggaagttggcaagaatgctcccatccagccaaaaagaaaagaaaaaaaagaaaaatactcagtgtttagagagtaacaaatgatgtgccagacactgggctaagtggtaggttttgcagggagaaaatggggaaactgacatgttaagatgccaggtaacttgcctgtggtcacataattaataaatggctcaactggattcaaatcctgatttgcctcactccaaagcctgggctgcttgcacagtgctaagtggcctcctaaaggaacctccacagcctgtgcaagaacagaattattggccaggtagtctaccattaaatggggttgccagcttgtggctaaagaaacagatgatgaaagaagtgctgaggagaaaacgcctgtttacaaacatagcttaattaattagtcaactcagatgaggcagaaaaggcgggtttccagatgtctgacatcgagaattaattagcagaaaggcaccagtcctcaggccttgggttcatggccagaccacatggtagaattaaattactagacttcccctccaacttaagccatttgaaagaaaacaaaaccccaaacaataaccttattaaaactgacaactcaactggaaaatctccaccaaccaaagcttcaagtgaagttcagaaaagaaggttccagtgcttccagttcagtttacaaaagagaatgaaatgaaagtaagttaggctaacagttggtaagttcacatctgtaccaagataagtaaaacagaaaattaaggtagcacttgaattcctatcaggcaaaagccaccatctttgcagaaatgttatcacatgagtcacttgtaaatagaaagtacatgtcaatctgcaggaatcaccacaaaatggggttgggccagcccaggagaatagataatatgcagccaatattaagtgtaatgtgtactcttcgggctcaggtgtgactttatgagtaaaagttactttccaggaatgggttcccccactgcttccacagttaacttttcacaggggttctagaactgctcctattttgttgtctatatttttatcagtgaatttctgcagttgtttgggactcatcctctgcctaagcagggaagttaatgaggtttgaagcaactttgtgtcccagggtgaatggaatataatgtatgtggagagaggtaagggcaaagagttcagctaggctggagggttgagggctaagcaaaggtagacaaggtgggattccacggggagggagggtgtgcaggtagactggtagatctggaagtgacctagaaaacgtctgtggttttcaaccagtgtatatattagaatcacctgtaatgtgattaaaatgctgatacctaggacctatctcagaccaattatattggaatcgctaagcaggtgattctaatgggcaccagaattgagacccacacatctgtggcaacctattgattttcctagtggggaaatgagggaacacatttggagaagcaaaagagagactgtgtgggtccctgctgtcaggtgacatttcactgagctgccctgagaactccactcctccttcacagcctcaatctggcttcatgggaaagggaagtcacataaagtcactcccaggtgctgggatccttgaccttgtaaggctgttgcacttgtgcatgtttgtagattccttcactgatatagaatgaggttgaggggtttagaccagtgaaggtcaaagtgtggccccaagaccggcagcatgggcatcatttgacatgcacattctcaggcatctctccagaactactgaattggcaactgtgggcagaacccagcaatctggttttaacaaagcctcacgcatgctaatgtttgagaactgctggtttacacaaccattttccaaaagtgagtctttggagacagggagaaaagtaggaggtaatggtggtaggggtgttcatgaggatactggcctgtgccactaaggataaaggctggaagtttactttggagtaatcaaggatgcagggtaaaactcatccccttctacaacaaagattttaatatttaccaggtatcgcctgcctgacctgcagccagctggtagaaataaaatgtctcttgtttcctcaaagagagctcatgccaaactaatatattcctgacttgaaaaagtttcatttgctcctacctggtcttaacttatatctttcaattgtcaactcttgattatgtctcataatagttaataagaagatgcatataatagtgaaaagataatcaacattttatttgacttgcagatgtattcacaactcatacccagtcagtaacaccagcacccacccccaaacccaccccacctgtttctgattctcccttggctcagggtccctctcagcgcctacgacacagctgctgacaggaggaatgtgccggaatgatggaagagctgggtcacagcagataatccatttatggataataaaaaatgtgtgtcacacttcgttgaccatgccagtcctgagctgctatacatacataaaagatccttcacacccaagatggatttcaaagcaaaatgaaaaacccatatgatttggccatgttcctactcatgttccagaataaaaggtagacataatctctctgaccaacgtatttactaattatgtgtcctgtgccagtctctgtatgagatcctgcaggggatacggtaggggatacacagattctgctttccaggagcttgtaatgaaactgaggaaagagaaatacacttattgagaaagacgttataacttccagtgtattaactatggtaggctaactgccataacaaatagtctgtgaaatgtattataattccaacacaatagaatttcatttctagctcgtgtaaccacattgaggttggcagggcagccttttctaagcagtgatttgggaacccaagccaatggagactctgccatcttcaacaggagtcttccaaagtccctaggaggtgtctgcattccaactagcgagagacaaaaggagcgtagttgagctgtcaggggagggttttatgggctaagctttgaagtgacacccatcacttctgcccatattatgttggctacgggtccatcacatggccacacctcaccataaatgggaaatagagtccatctgtatacccagaaaggtgaacaaacacattttgttaagtacccaacagtttctgccatactgggcatggttggggaaggtgtgtgaggctgggggacagttttatttatttacacatgtgttgtttcattgtttctcactatcacagtaacttctgaagatcctgctatagttaggatcctgttatctgaactcgttgctactttcttgatttttcctagagttttactgaagactgggcagtatagcccattccaaggatgagcattattgggaggctatgaaaaaattcagcaagagaagggtaacaatcttcaaatgatgcatctttaacctctttgtgttcttctttttagtcaatacttcactgcttagtgccaatccatggaaatcactttcgtgctggcactgcccagagagtgatagatttcattcaggtgcctgggccaacagagggtccagtaaggcaggacagaaactgctttactcggagtgttcattctggggtctgatggaatattaatgctgagaggaggctgagaaacgtagactgtggaggaaaatgggaggaaacctcttcacactgagaaggggagatggtgaaaccaagtcagctggaaatggagagggggccttttgatgttttcctgttttctacaggaagggaaatcaatagatgcctttaaatgctcctctgggtgaagaatggatacttatctcatttctccctctcactactcttccatcactttcccagacaccatgttactagtttagggtcctgggaggagcagaggaagatggaaatgccacacacatctggactacaaccccctgctgctttgcaatgaagacaattttctaattggaatcaacagacacccagtgtctgcagtctctgttggaaatagcagacgtaagtagcaatcaaaaggtagagtacaagcacagaaggattagcatgtatgtgaacctgggctttctaacttggtgccctgaatctagccatttgcttgttttaagcaaggcattctgtttcatttaggcagttagtggcagtgaagaaatgagtgtgtattggagtttcctctacattatgctgagaaaggtattttatacctcacagattttatgatggagacctaagcttaggcagaagttgcctgtattcacatgtgtaattagaatataagttcttctttcgtttattcagcaggtattatttcgcaacaatcaggagtcaggaattttctaggtgctgaggacagtgatgataaactagtccctgccctccagaacattctagtgagggagaaagacaataaacaaatatatagcaaaatatcagctagagagagctattgagataattaaaggtgggaaagaggatggtgtgtgatgggagttagacaggatgttcagaaaagtcttctaaagaggtgacatgtgagcagaggcttgaataaagtgaatgtcatgtgactatctgaagaaagaggatttcaggcagaagactctgcaagggcaaagatcttttgatgtggctttgcttggagtgtctaaggaatagcaagttggctagtatagctggagaaccttgggggaaccaagggaagagtggcagaaaatcagtctggtgagatagggaggacacagaccatgctgggcctgcagccatagtaaggctttgggtattctgtatgtggtggaaagtcatggcagggttttgagcaaatagcagacacaaactattacattttgaaagaagcactttggttgctacacaggaattgactaaggggagcaagagtggatgcaaaagacaagggaacaggtgatggggacgtgactgtgatgatggcaatagagggagtgtgaagtggccactttctggatatgtttgacaggtggagataagaggatttgctaatgaatttgatattgggttgagagaaagagagaaatcgaagataactctgaggttttgggcccaagccactgggtgaatggtggtgacatttactgagacagatcctgggcagaacagtgattaggctgtggccaatacagttattgataccagacagcttcaaatcaaagcccaggtctgctagtgatgaactgtatgacctctgtatctctgtctctgaatctcagcttcatcctctgttaaatggagatattaataatacctaaatcatagggttgctatgaagattaaacaagttaatacttgtaaagcacttagagcagcatctagagtaaaggaaactctcaataaatattgcctaaaatgaggaacatggagggtgtgaaacagactcacagagaaaatcaagagtttgtattgggacaaggtaagtttgagattcctatcatatatctcagtagaaatattaatgagtaggtgggcataagagtctgggcttcaaaactgatgatacaaatttgagagacattgacatttagaatattttgcaagttgaaagactggattttataatcttgtactcattggccaaattcaggcaatagatgagaaattatatgagttttgagagctaaagagaaaataggcagagttgcagggtagtatgcaagaagaggaattaatctagatgtaggtaactgatgtttcagtggaaacctgaaggatgaacctccattggttattatgctcactgttcccctttgtatgtttttaatcataacactcatggcccatgttgagtaggttaaaaaatgtaagtatagaaaaggacagtgtgaaatttaattacacacctgtgtacatttcctcaagaaaaatatcagttgtcttcttaagtgagatattccatcaccagtaaaggttttggcaccaaccagtgaatggaaatgtcacaatttccatacagtttgcacttgcagcaaaaaatagtccatggagtagtcagaattctctcaaaatgataacgataatcacgacacagggccttacctaagctaacaaattattatcattcataacctaatagtaagcaggaccctgatgaaaagatttactagttttcttctctatttaggacactatacccttagaatatagagagaaactgcatctattaagaaacttattcaaatcatccacctactatttcagcattcttctccctttactgtctactttgtgtaccatataaataaggcccaggctttacttatttactaacaatcagtgaattgtttcaccaactcaaacagagcttggttaagagtctaggccaaaatgctgttactgacctgcaaataagtgttatgtgtctgagtggcaaaggggatttaaaagaaacgagattagatttctcactcaagtggaaaggaaggtttctacttttcagaaaaacctgctgtcatctttctgctgtcccagatggtgagagttatgtactccttgacctgagccaaagacaacataagagaaaacaaagagacaaacaaggtctgctcaaagaaactgggcaaaagctcatttccaatggtttaagtacacaagagacaacttctcagacaagggcacctcccttgaccctgtttttcacactattgttcacaaggttactgaaagaaaagtcgtataagagactagtccctacaatacctggaaataacaatcatataattaaaggattttgagctcagtgatttttgtttttgcaagaagtaaaccaaaaccaagacatgtccacgtgaatgcataagtacatactgaatgaatgtgaatggaaatgtccatgcaaacagaagggggttattggcagaggcagcccttgagcactgaccatggactgtagaaagtatcactagggaaaagtcatgctttccaaagacaggcaagagctgggcttcagttttccatctggtactcaaaacacaagaaaggatctttttcacttgcaaattcaatgtacctctggaggtacatgagtccatctctgtttgaactctcatttcaaaatggttctgtcctcaaaatgtaagtattaggacacagatgtcagcccttgacactaaaaaactgcttggaaaataaggttggcggaagcttccaagaagtcctgttacccagagaactgtgtattcctggtgacctcagcatggcaaattccatcctactccatctatggaaatggaagggtctgaattttctggacattaccccatttcttaccccagttaccttactcctggttccctaattatgacaacccatggtgaagatgagcccctctttgcacgtttgttgtacctcagaggaaggaaaaaggaaatgaaaaatagcatttatggaatgcttcctatctctcaagccctgaggaaggcctgcatacacagtgagctaagttaagttttctccatttcactgaggagggagaaaagttgagttgcccaaggtcattgggctaatgagttgcagtgtcaaaacatcaaatccaattgtctctaccaaagccatattctttccaggcaaggtagtctggtttagatcatgcccattctactaaagatcccagcagaatttcaggagcaatgctccttgattcatagactgtggcaaccagtcagcagcagaccctagtgccagatagcgcttggatgggtcataaaaatacaaagattctgcagtggtagaggcagtaaaagcagtcacagtgttcatagacactgaagaggtcagttctaatgccagataaatcctgcagttttcagcagtccctgtgttaatagctttttcatacccgaagaccattaataggtcacttctcaacgttcaatgtcccatctccttttacgttcccacacgtgttccacttactggccttataatcattctcttgatttccaatagacattcacaaggttctttttatctcctgaaaattctgcagttctcaacaggacccagtactcaaggaagattggaaaagcataatgtgccccagaagagagatgacctgatcagcactcagaatgctcttatcagaagcatactgcatcctctgctggggttccacacttcttttctttcatttcactggagcctttatttcctctctttcttacctgtttatcctattgttgcttcttttgtcttttcttctctccttcctctactcattttctttttcatctttttctctctccatccctttcccttattaaatttcccatgttcttttctttcacttcctccgcctcttactcttcaccttctcttcttctttttacacttttagaggcaaatcagttgagttgaaaaaatagagatgttgaagtcacataaacctggttcaaatgctagtttttccacttatggtatcattggaaaaataactattctgcacttccttgaggaagagggataccaggccctggtagacgtaaaatgtagatacaagaccaggcatggtggtacatgattgtagtcccagctacttgggagtctgaggtgggaggattgcttgagcccaggagtttgaggctgcagtgagctatgatcatgccactgtattccagcctggatgacagagcaaggccctgtctctaaaataaccaaaaagaaaaaaatgtagatatcaactatatttatatgtagatctgaatattaaatgagatagcctgtgtagattcagtttaggactttatctggaagtaggacgttcataagtgatagtcaaaacccctgcttccatactgccccttgccctgctattgttaagcctatcttgtctcacacattgatcttgccttctgtctgttattccccatagctgttgtctctggtcctggctcagcatccaattcattccccctctctattgtatagtttgtctttgactggattctcctcatgttctatgctcctttattccgaatctggctttaagtagaaataactagacattacagaatgttgcatgttgacaaaacgttcaagcatcacagtgatggctgattctaaaaaatgtaataacaacactattaaatactttgaaccattctgaactatctattatgaatgagaagcttagggccaaggcatagccaaatttccctgtacctgcaggaaccaaaatgtgtgattgagatggagcctaggtcgagtaggtaaggacagcactcattacctacccaagtaaccagaagataatgaggtttaaaaaaaatttgaagtttttaaaaatttgtgagcaatagtaaccattagttgttacaccaggttacttattggtggacacaactctgttgtgagaagaaccatttagggtataaaccttccataaaaacttcggaaccatagttttcctttccagaaaacatagaactctgaatataagctaaaccctgctacttaattgtatcatgcttattattattattattattattattagatgaagtcttgctctgtcacccagacggtggcacaatctcagctcactgcaacctccatctcctgggttcaagtaattctcttgcctcagtctcctaagtagctgggattacaggtgcctgccaccacacctagctaatttttgtatttttagtagagatgggggtttcaccacgttggccaggctggttttgaactcctgacctcaagtgatcctcccacttcagcctcccacagtgctgggattacaggtgtgagccactgggcccagccttgcatcgttaatttgaggttcatggtaacccatgtatctttgggtagctctcagcctgacttgccatttccatgtcttatacttctctgtctttattttctctgagttcttgacttccttttgcccttgtctttattgaacttcatcctgttagtttctgattacttgtccaatttgttgaggtcattttcaattctaattgcatcccccaagactttagcctacactttaaattcagtctcatctatgaacttaatgagtatgctgtttcggtaacaaagtcatggatgatcatcttaactagaaatgaatccaggactgagccctgtgcagcaccatttttagtgtttactcattagaggaaatgtataggcaggtgctttaatgaagttcagtttagaaaatataggcctccttcttcagcatctggaattacttggctagaatttttaacatttttggcaattcaaggctgtatttctatacaagtgaaatttaattaatcaaagtcattctcaaaatgtaaccttaaggtcaggcgtgatggctcatgcctgtaatcccagaactttgggaggcaaaggcaggtggatcacctgaggtcaggagctcgagaccagcctggccaatgtgatgaaaccctgtctctattaaaaatacaaaaaattagctgggcatggtagcgcacacctgtaatttcagctactcaggaggctgaggcacaagaatcgctttaatccagaagcagatgttgcagtgagccgagatcacgccactgcactccagcctgggagacaagagtgagactctgtctcaaaacaaacaaacaaacaaacaaacaaacaaacaagctagctaactaaactaaactaaaatgtaacttaaaaaaaccccaactcattattttgattatgaaagtcagtacctattttcaccattcttccctgagaatcacttgtgggcacactctgccttgctgaaggagcactaagtaggaggcaaggtgctggcttctagttccatctctgctattcagcgtatgatcttgggtgagtcaccaaacctttctcagcctagaccttatcttcatcaaatgtgccttccagatccaagaagctatgactctctcttaagggctaattattctcagtggctaattattacatgtatactttgattataagcattcccatgacacttacatataagattacaacttcaaacacatttaagaagtaaaagttagactagctttgcatattgcctagaattcatttgccaaaaatgcatgtttatttgcttatgcattccttctccgtgcgtgctcaaatatttgaatgctggttatgtgtcagatactctgataactgttattttctcatgaggtccccatctaccgatatgatatttcagaattctcacttgaaaaatgaggaaactgaagcccagactggtttagtgactgctcagggccatggagctggctttggcagagttggggcttggctttgggttttgggacgtagagttctgaaatctttccattatgctatgattgcatggctacctagcttattcttcaaactcagtatatgccacaaaagaatacaccatcaattatagcagcaaccaattaaaggcctcaccacacaatagagaactgtctctttttcaatgatgaatgaccatcaacttagtctgtgaagacgaaagttattctaaaatttcttacactggaaatgtgtaaataattttctttaggaaatatataaaggctattttctaaaggatacttgaatctgagtctggaaaagaataattttgaagaagtcaaattcttagtaccaggtgtacctaggagatattacaggtttggttctagaccaccacaataaagcaagtattatgataaaaaagtcacacaaatttttgtttccaagtgcatataaaagttatatttatactatactgtagtctgttaagtgtacaatagcattatgtctaaaatcacaattcatataccttaatttaaaaatacttcgttgctagaaaatgctaaggatcatctgagcctccagtgagttgtgatctttttgctggaggaggatctcgcctccacgttgatggctgctgactgatcagggtagtagttgctgaagaatggggtgactatggcgatttcttaaaataaaacaacactgaagtttgccacaacaattgactcttcctttcatgaaagatttctctgtagcatgctacattatttgatagcattttacccacaacagaacttccttcaaaattggaggcaatcctctcaaaccctactactgctttatcaactaagtttatgtaatattctaaattctttttcgttatttcgacaatgttatggcatcttcattaggaatagatttcatctcaagaaaacactttctttgctcatctgtaagaatcaactcctcatttcctcaagttttatcatgagtttgagcaatgcagtcacatcttcaggctttatttctaattccagatctcatactgtttccaccacatctgtagttaactcctccactgaagtcttgaattccttaaagtcatccatgagggccggaataaactttttctaaacttttgttaatgttaatattttgacctccttccatgaatcacgaatgttcttaatgacatctaaaagggcaaattctttccagaaggtttcaatttactttgcctacatccatcagaggaatcattacatatggcagctatagccttatgaaatgtatttcttaaataataagacttgaaagttacaatttttccttgatccataggctgttgaatgaatattgtgttgactggcatgaaaaaacattaatgtccttgtacatccacatgagaggtcttgaatgactagatgtatttattgtcaatgagcagtgatattttgaaaggaatctccttttttgaacagtaggtctcaatagtgggcttaaaatattcggtaaatcatgttgtaaacagatgtgctctcatccaggccctgtttttccattgatagagcatggatagagtaaattaagccgaattctgaaaggccctaggatttttggaagaggtcagtgagcactggcttcaacttaaaatcatcagctgcattagtccctaacaggagagtcagcctgtctttaaagctttaaagccaggcattgacttctcttctctagctatgaaggccctagatggcatctttttccaatagaaggctgttttatctatattgaaaatctgttgtttagtgtagccacttcatcaatgatcttagctagatcttatggataacttgctgcagcttctccatcagcacttgctgcttcaccttgtacttttatgttatgaacatggcttctttccttaaacctcatgaagtaacctctgctaacttctaacttttcttctacagcttcctcacctctctcagccttcaaagaattgaagagaattagggccttcctctgaattaggctttggcttaaaggaatgctgtggctgatttgatcttctatctagaccatgaaaactttcttcatgtcagcaatcaggctgctttgctttcttatcatatgtgtgttcactggagtagcacttttggcttccttcaataagctttccttttcattcacaacttggctaattgttttgtacaagagacctagctttcagcctttctaggttttccatgaggcttcctcactaagcttaatcatttctagcttctgattttaaatgatagatgtgcaaatcttcttttcacttgaacacttagaggccattgaagggttattaactggactaatttcaatgttgtgtcttagggaataaggagatccaaggagaggaagagagatgggagaaaggccagttgctggagcagtcagagcacataagatgtttatcaattaaatttgctgtcttatctgggtgtggttggtggcatcccaaaacaattacagtagtaacatcaaagatcactgatcaccataacagatataataataatgaaaaagtttgaaatattgtgagaattaccaagatgtgacacagagacatgaagtgagcacatgctgttgggaaaatggcagctgtagacttgctctacccaggactgccacaaatgctcaatttgtaaaaaacacagtgtctgtgaggtgcaataaagtgaagcacaataaaaccaggtgtgcctgtgctaatttcttcagagaaataaacaatttctttctcctcctcctcttccttttttttttctctccaaaccctagtttttcattttctttcccacttgatatgggattaggcctctaggtagagggaatgatgtcaacaactcctttccctgacctccttcagcatttctcctgtccaattcactgatttctctgattcactcgcattttccctcaaggcaagttctacataaataaatgtttaagtaacagaaagagaagggggtgactcttaaagacttagttgtggaatctggggaagagtaaagagaaagaggtaaattggagaggaatgattagaagaaactcaaaggcatcatttcaccacataaatttatattcttctagtcagtcaccttggacactgaaagtttttctttcttaactccccagacagtgttcactggtaagtagtctacaacagctgctacctggaacaaaaacgaagagctggatacagcggcagatatgagaggtagtgataggaagtttctctccctgatttacaaaaagtaattcaaagacatatatgcaacatttctaatgacaagctttggaatagaagcatctgcactctccttgctaagcttttcttttattacccatttctcttcctccaactctatctactgtctttgactcctcttctttaagaatacctgccttagtgtgtctcccatatacaggaataaaggcactgacattccttttatgttttacatacatcagctgtttaaatcctcactgtaataaaaagtggtagatattattgtggatacacccaaaggggaccacactgggttactgccctgtgtaatcccctccctgtgactttcttttaaacaatagaatatggaaaagtgatacaatgtcactcccttaattaggttatgttttaatcgcaaaggtgatataatgtcactcccatgattatgtcatgttatataagctttcgctttcttcttcttcctcttcctcttcttcctcctcctcctcctcctcttctccttctccttcttctcttatttccgtatttattttcattttttagagacagggtttcactatgtcatccaggctggtctcaaactcctgggctcagactatcctcctgcctcagctcccaaagtgctgggattacgggtgtgagccactgcacccagccacaaaatttcttcttaacacacttgagaaagagattctcctcttggccttgaggaagtaaacagccatttgtcaactacctatgaagagggtcgcatggccaggagctgtgagctgtgagtggtttctaaaagctgagggttgtttccagtcaatacccagtaagaacctcagccaaatagccacaagcaaatgaattcagccaatgagcagcagacacttagaagtagcatcttcctcactcaagcctcaagatgaaaacatagcagggctgacactttggttgcatcttttgagaccctgagtagaagatccagttaaagacatgcctggagtcttgacccccagaaactgtgatataagaagtatgtgctgtttaagccactgggttgatggaaatttattatgcagcaatagaaaattaatacaattgttatctctttttaatagaagaggaaattaagctttggagaacttaagtatgtgagcttttgataatttgagtaagtttgttcaaggtcacacaacccataaagcaacaggactcatacttaaacttaagtcctcctgaagcccaaaggttaaatgctgtccaatccaccatgttgcttttccacaattctcttctcattaactttcattgttgactgaatataactatgtatggattacaatatgacttctggtgattttgaacccataatgtatatggtcttgaagttaaaaataattgaagtagtctgttcctctccccatgccctcctccctggccatcgtgttaaggaatgctgcccacctcttacccctgaaagagcggagaggaggagaggaaaggggctgaatagaatagaggggtagcctgactagcattgaagagaggtccacacccactcaaaaggggaattcagtgaatgtcttccaaaagataactgctccacctaggaaaaagctctgagggtcacaaataatgagcctctcaccaggaataccccagaggcagaagcctagggcctatgaataaggttccatgctctgggttaatgaatcccgcagcttctcctcaatactattggtttcagttggatgaaaggacgctggcagtgggatgactttgagcttgacgagtcagagagcattggttgagatatcttaggggctgtctgtttgatgtggattataaaggctgaaaattcattggtgaggcttggctgggcctgtctgctgttggaccaaattggactgtattatatatgggccacagttaaatcactagaacagtaataaactaggtgtatcaaaatattgacatgccaaattacatgagagcacatacggagtagtataaaccctagctctatctagtctatcatattgctgaatttctaaagcacagtttcagaaaaagctcaacggacagttgagaacttattccatgccaggcccagggctgagtgctgtgagggaaacacagggtgagttttacatagctctcaccctcctagagtatctaatccagtagcatagagaagtataaacattaataactaaacaaccttacagacatttggaattagcctctttggagcaagcaatgatgaagggcacagctggcactggctttaacgcagccaagtaggtgacactaagtcacttggaagaccaggcagcaggtgtgaaaagcttaaggggcaaggtgtcacttgctataagaagtcctaggatttaaaatttcctcccactgccacagagaaagcagtttctcctttgatgaaagaccttattgcagttagcgcctttgacaataggcagggtccagttgaaaggaccatgagttcaatgaacatttctggattttatcatctccaccttccaagcagaaggcaatcacaggaagtgtggagtgaggactttagaataagtataacaaatctctgccctggaggatcttgtgatctagttaaggaatactaaattacatgctaaattaaatacctaagaggcataggagctgtaggagccttattgttacatctccttgagggtccagtatcttctttaatttattaggatattggttttaacatatgtgctatgtgtggttgacatcacaagggagagaaggagaagaaagagggataagaagaaatagcctgggaaaaaatagcacaatggacaaaaatactggctttaatcacacactggtttgaatctgggccctgccactagtgtaattgtgaaaccttgagcaattccctgctacctctgagctcagcttcctcatttggagggaatattactgatcttgccaggggttgttaggaataagcaagataatgtatgtgaagccggtagcatgaggatttgcatctagtagatgctcaaaagtaatttatcaaaggaaggaacaaaggcaggcagggagagaagacagaagatagaagtgggagggactcgctcttctctactgccttattttccttgagtgttttaggttttcggctgaagcttctctgttatataccttcttctttccttttagcaagaggtcaactggtgctgagaacagcttacaattggttcctatgagcacttccacaagattacaggtattcagggaaaaaattaaatcatagtaaaatatgttggataaatgctatagtgaaattaagcaactttttttactacaggaatcttagagcctacattttttaatgtgcattttaactcttcgagatgataatataatagacagcatttcccaagttaacttgatagaaaccagtttttcattgtagatcacatggggttagggtccattgaatacaagttgatatttatatcaagatatcataccagtggacaccagactgtttgggaaaatgtccccagaagaagctgcttggaaaataatctggaagatgagccccatcttctgcataactaagtggtatgaccttgcactaaatcattcaaacctctggccccctggttttctcatgtgcaaaatagaaggatgaagatacatattctaagtacccttctagcgctaacagtttaacatttctatgtgagcataaactacatgattaagaatttgaaaactatacacattactatgttccttctagagaaccagcaattcacttcaacagaagcttcggaggtgttcactgagcagccactatacaccatgctgtgtggtagatgccctgcactgcccaggctccttcgattgatggttcctggaagagtttgccttatgaacaaagcagaaagaggaagaaatctctttggcttggcagtcaaggccctccagagtctaggcatttgatattcttcatctcccaataattatgccaaccttggtctttcactccttcctctcctccatgtggacactcccttcatatgaaagtattccacatgccttctccacatgcccagtcatgtgcttccctccttccttcgcagcattatcttgcctgaaacctgtccccttcctcccctctgtcaatgtaaattctcttctttcaggacaccaatcagatcacaggaagtctgccctgtccccatagtagggaccttctctcactcacttacaattcagcagaccatagtgtgtgccttctcactaagatgatagaaaatcccctttacatgtgtgttgatttatcttacccatgaaatcttaaaaggtagagattcaggacgaccagccaccctttctttctgctggagttctgaacaagaaattatatcccatgaacatcaattggcaaatgggggaaaaaagtcccacctcattcagttcagtaactcctaatccatcttctcaatgaggtctgccttacttaaaatgtcaacacactccctgtaacatttcagacctcctcccttgctttatctcttcaacacttatctctgtctaacaaattgtatgatgtataattatattgtataatttacttattcccaacattttctatctttcctgctagaatgaatactccatgaaggcatacatttttgtcttttttgttactgaaccctggtgctcgagtagtagattagttcctggtgcatagtaggtgctgaacaaacttttttaagtaaataaatgaatgcagaactctctggtcaaagctgagttagagaataccatttaacctaaaggacttcatatggcctcttactctctgctcttctaccttgcaaatctgtgctgggatctttccactaaatgagagggaagtccaatttgaagcatacctgccagtgctagaagaaaaggggcaagagagatagcaagaatacatctgattgtctcaaaagccaaggcctaagatgttttatatcttcccaaggtctagtacctcaggcagggatggcctatggtagaaaagagaagaaatgacaagggcaatgtgggcccaggaatggtctttgatagtggagtctgtcctgcattaaaaccaggcatgtggtcaataaaattaatcagcagccatgtgtagacagcggggcctccaacatctgtccccaacccagtggggacaagaatctagaaagaagtttaattattttgggaaaagaaacagagatgagacgggaaagaaaaatatctcagtgtaaactttgtcaaaaaatagcaccactacctttatattcagcataaaatggtggctcaatgaatattagctgattgattggctggtgttgattttataggcatttgtagaaattctggaagtgaaatagtggcaagtataatgtccatccattttactgggcttagaatccattgctgatatttcccactcagtgtaactctaaccctaactccttaatatgaacccttctctacctgtctcataactaagctagaaaacagcctatatcagaagttgttttctagtgccagtaaacagaaattagtccagtggtctatgcgaaatgtccatgaggtttgaacagatccacgtttctctgacttgatatttgcgtaatcctgaaaaagtcatctaacctctccagatcttggtttcctcatctataaaactaggataatatttatccagtaagatgagttatgagaattaaatgagaacaggatttgatctgttcatccatttaacatttaatgagcatttactgtgttctaggctgcatcatgcactaggaatctagagactaaagagtcagttcccactctagggaacttatacccatccataagaaatgtattatggttctctgaatctaccatacccttttcacctccttgcactacacatggtttctgctttgtctagaggggccacttttcctcctcctacctcagactttagcactttgctaactcttcattactcttgaaggttcacttcaaatgtttccttctctggcaagcttttcctgacctctctgcagcctctgtggagaggctctctgtatcctctggagaagaggtacaagtaaacatgagcaagtgcaatatggtgtaataaatgcatggatgaagtgtgttggttagtttggaaacacctaatctgtttctaatggaggccgcagagaagtcaggaaaagcttgccagagaaggcaacatttgaactgagccttcaagaactgtgaagagttagccaagtgctaacagtctgatgtaggaggaggaatattggcccttctagacaaagcggaaaccatgtgcagtgcaaggaggtgaggaaggtatggtagattcaaagaaccataatcaatttattatgcatgggtataagttaagaaattatggaaaaagagaaggaagaggcaagcaagacacaccaatgggcaggcggcctaactccaatcaccaatgtctctttcagaaaggagacacaaatggttcaactgcataaggcaaagagagtcaaaggtctgtctctgatcactcagtagcaagattctgaagaaagctgctctagattgttattactgagaattactaaaaaggctgaagaaagaagacggtggaaaaattcaacttcctttccaactatccttcccagcaaggtagctgttaacaaagaaaatagaaatggaagctccttagcggggctttgagttttcatcttgatgtcactggagcactattgcagagttttagtcagggaactgacatgaataattttatgttttaggaggatccatctgacactgtgtgaaggatagattagaaaagggctagattagagtcaaggaaagaaggaaattgcagtaattcatgcaatcaatgacaaaggcgataaaagagaaaataaagaagagatggtagatcaaagagatggatagatgaggaagaggaatcacttagcaagtcccagctttctaccttggacagttaagtagattgtgatgccaacatcgatacaagaggagaagcatgttggaaagagaggggagaaaatggggcattaacttttgagtttggtgggcttggggtctctgtgagacataaaagttaaggcttaaaagaagggggttggtcatctaagttgggttcaggagaaatatcaggctatgcagatttgaaaggcattacttttagacaggcatttttcatgaagtctgtgtagatgggtctctgagaagatgagaagatcaaaaacggtaccctggagtacatcaataaataagggaaggcagagtgggagtaaagatggaaggtaaggggagggggagtgagaaaaaaagccagcagagaaaggagagacttaaacagaaaaaaaggaggagttgcaaggagataggggtccccagtatcaaatgtcagagagatgtcagtaagttaacaaatttacacataagaaatcacaaatggcattaggaagggcaattataatggaagcacacagtacaatattaactcagtaggcgactttcattctcttcaagtgtatatggtgggagctcacctaacaccacagctttacatccactatttcacataagtatatctctacccattttcagtaggcatgtttcatctataaccactaattggtaacattaattgtccatctttcctcttttctgcagtacaggcctatggttcacactaaaatttctatttgttgagccagtcttaggactaagtatctgatttttgtcaaaaatcacaaaaaaatgttatgcaactctgctacctcctttctgcactcccttctgactctcaaaatccaaaaaggctgtacctatgcttccagtattttctgtctgtgacccaaaagcagaggaatgctgtgccaggggtgggctgctgaatagccctcactgctagagtggctcaatgggaatcctccgatgaaaggcatgacagaaaaggtagatgttatttctggaattattatgataagaggtgtaatgagaagctcactgcagggccagataggaagaaaagggaggaggtggcaagggaaagaaaagcttccctgggctctttgcaaagaagctctaggaaaatatttgaaaatgtgtgcatgttgagaagtggcaggaaacagaagaatgaaagaccccaacaatggttaactaattctgtttgcttgtttgtatatgaaaaaccaaagtgaaaatcttgacaggaagcacatcttttaagaaacccattgctgactctgatggtctctgcttaaaccttcagataatagccttacaggttaatgccaatgcaatgatatacagaacagtcttaggactggctcccccaaactgctggctgccaatgcgtcaaatggttctgtttccaacaatttactttcactgagttcctgtatacaaaaagtgctgactctgtttttctttcatagatgaaactgctaaaagccccaaagtccagttctggccatcctgctggtgtgttttgctcttctcaggtggtattgtccagataactcaggtcctggcatctctgttcacctgttacaatggcaattacaatgaggaaaagctagatttgcctccagttctgcaaagcccattctaaggtttcagaacagctctcagggtgaggataatattctgtctcaggttctggctacttcactgaaggttttacaagcaggagaaacaggcttacacctgttagaaaggacaggaacccaggagaacaaaaaacaatatttcaacggaagaaatggaattgaaaaatgtcagtcttccacagccttctccctatgagtaaaagaagtgaattagtaattccctgagttgggccagtgtaacacttttgagaaacccagagaagttaagacttagtagggtggtagttgcatatcatttggagagaatcaacattcaaccaaaaaacccaccgagcacaagattacccaaaggcattcaaaagccgtaaaattcttatacttctttccatgtacaagaaaaccagtgagtcaaaagccacatcttttcaagcttgttctcctaacctacctcatcccagaatagaaccacccagcccaaccagtcatgatgatactcaagccatgcctaaggctaaagcaaaaatgctggccagattcttgctgtcagcaaacatcaagtatgaggcttgaattttacagcggtaagaattgactgagaaggaaaatgggcattaggacacttagaagctactgcagattaatccccactgcatcctcaatagaatgagaatgggaccagacctttctctgtgttacattcagtggtgcatgggaggtcagcatagtctctggaattcgactgcatggtccaacgcctggctcttccattgactagctgtgtccttcagaaagtcactaaacctctctgggcctcatgttgttggcctatatttgtttttgtcatattaaatattgactccatagcaatgttgtgaggatttgtatgagttaatgtaagtgatctgcttagaacagtgcctgacctataaatactgacatactgtagacatattatagtgttagctattactaacactttgttatctgtcaatcagggctccagttgcttgagagaattgtcttacaagaaggattggctgacactccctaaattttctgattccttactttcatttcctctgccttctgccttagatggagtctgtgctgttccttacctcttttgagaaaactccacctccactcccttctagcttctcctgtagtgtttttctttacctttccctctccgttctcttgcttctctgcctgtcagttctctccactcatcttcctcaatctccttccttggagaacagaatctagcacactgtaggaacgtattaaagatttgttgaatgaatggtcaaccaaagcatgaacatatgattcagttcctgaatacaataataatttcaaaatataaaaaggaaaaaaagcatcactgtgccctataaattgtttctaattttgaaggaaaagattacagagaaagagacaaatggtcacacgtaaaacagtatctaggatcacagaataaaacgaacaaacaaaaagagactgttttgcagtggggtagggaacactggtggtgttctgtgtgcacgtaaccatgacacaccaatgtgcaggcagttcagcctgactcgaatcaccaacgtttcttccaggaaggagacacaaataagtcaactgcacaaagcaaagagagtcaaaggtctttctctgatcgctggtcgcaaggttctgaagaaatctgctctaggttgttattactgagaattttactaaattttactaaaaaggcagaagaaagaggacagtggaaaaattcaacctcccttccaagcatccttcccaggaaggtagctgttaacaaagaccatggaaccaagtgactgagctgccccatctaagaaatgaagttctaaaaataagctattcttataactaatgaataaatagatgtcactaaaaatacgccatagtcagaacactggaaaatctaaaactgtacttaaaactacagattgtttgaactagatggaccataagaatttaatccaaccctcttgttttatagatatggatggaaaccgaagcccagggacattttgtgacttgtccaaggtcacccactagatggatggcaaagccaagacatgataatccaaggggaagggactcatttctttctgggatactaggactcagaaaacggatcaatcgcaccaagtcaagtacagatgtcctgcttgagtcacacagcatgggattgccagagtagggaaggagagcaggagaggggcctgggagttgctttgctgccagtcagctgactgactgcaaagagtcaataaaagttatcttcaggattgaaaaagtaaggtgaaggggaagtggagcaataaaacccactaggaaaaccacttcctgtcttggagcacgtggttactgaatggtgtcctggggaattggggatattccaagaatcagcttttaagggccaaatagcttttccatgttctaaaagctgctagagctccccttcatgaagaagggcccaggtgctcatctattattaagcatgtttaaaaaggcatttaagagaaagcaccaggagacagatttgtagctgcaatgggaatcccaggagggcagtgcttgcttagagaaggagcagagttcatgttagcgatatgggaagagccaacacaagcaggtgtttggtgttccctgacacctgttggtgtgctcttcagcagttcactaaaaagtgagtgatgcagaaggcaaagccaacaaatgccagatcttcctactatcaatacaacacgttcagaccaataagctatgaccaagatttgccccttgtgttggggggcagggaagaggggagtacagaggggcagaaatttaaaaatcatgggataaatacatgaatctaaatagataatggacagagattagatatttcatatattttaatagtagataaatggttagtttatacgatttaatatatttatgacatcattcacagcatattgtgattatagattataaaacaggatgtataatactatctcaattttataaaaatattcccacatgtttttataaaacacatttataggctgggcacagtggcttacgcctgtaatcctagccctttgggaggccaaggcagtcggatcacctgaggtcaggagtttgagaccagcctgaccaacatggagacaccctgtctctactaaaaatacacaattagctgggcgtggtggtacctgcctgtactcccccagctactcgggaggctgaggcaggagaatcacttgaacccgggaggctgaggttgcggtgagccgagattgtgccattgcactccagcctgggcaacaagagcaaaactccatctaaaaaaaaaaaaagctaaaaagccaacccacacatttataatataaagataaaaggactaaaatgatataaatcaaaatataaacaaattatctctgggtggttgaatttggggtggattttattttcttcatgctcttctctaattaacttttccttaatgaacgactgctatacttttgacatcagacacaaataacaaaatatcgttacataaaagagaaatgaaaacgaaacaggattcctcagattctgaaaaagagatcctcataattagatggaatacatttaagaccacggtttaaggtattttccttctttaggatcttacacttaagaagagtcttttaagcggccaataattcagctggagaataaaaacatagattttgaagagcacagatccatcactgaagaacaataagaatttatatttgggtaaaaatatttgtgtccatctattccttaaattgtcaagaaaaaccctaatgcctgagttttaaacaatgagtaaaagaacagagctacattgttctgtgattgcctggcatggtctgtttttgatggggtggggtcttgtgaagcatttcttcccaatgatgcatgaatgagaaccaccgagaagtcaggcttcatcccctcctctcctccttaaagtcccctgccttcaccttgctgtcaggctgtcctggctctaccaacctcttgggtggtgactacttctccctttcctttgctgattccactctctcctcttaccctgtacccacccagaggcatgtcctgtagcccatgtccttggtcctcttccctctccttctgttctcgttagaaactcatcttctcactagccttcaattatcccctccgtggagaacatccctcagtctgcattcttagtggtatcttcacaccagaaccacaaattgacatttctacttccctcctgactcaacagtaactcagaattagaaatcctaaaattgaacccatgaaactgcttccccgtcactaattttgttccttgttttgatgtcccagtgtcccataaatgtcccatttcctgaagttcaattcttcagtggtcattgtctcatctttcccagtaggttacagatttattccacctctgccatcactctcgcagccacctctgctccatgattgtccacattcattcaggcccaagatgactgcggcattcctgcaggcacctaagttcctacaccccatcacagctgctggatgaattttttgaagagaagtcataatcacatcactctcccactcacaaacatttcatggcttccgattgcttcttgagttaattcaaactatctttgcttctaatgctctttaagctcaatctttacttaaagatgtctctctacccccttatttgtacctatcacctagacaatttttttaaaaaaaaactcttattcaataaacaaatattgtacttcacctgttactccctctgcctgaaatatcatcctcacttccaatattactcacctctaaaaccttccctatcatttaaagcctatcaataaaatcatgttcttctcaaaacccttcctgattcccttaaccagatatgtaatttctttttataagcccctttgtcttatcatttattagttatctattgctgtgtaaaaagttataaaacttagtggtataaagcacaaatattgattatcccacagtttctgtcggtcagcttccagacacgctttagctgggtcctgtggctcagggctgtatacagggctgtatggcagcgggcaggccccagtcctcatctgttgctactcagggacatcagttccttgtcacttgggcagggttgctcacagcgaggtggctggcttcccttagagcaagggatgcaagagagagggccccaatacagaagctagtcctttcatgtgcacatctcaaaactgacatctcatcacttcactattctcttccaaataatcaagttgctaaatttagcccataactgggggagaggaccacacacaggcatgaataacacgaagtacaatctttgggggtcatcttagcggctgcctaccacatcatattcttccctgcatcatacctgtgtgattttcttaacccctctgttaaaagggtacatttcttgagaacagggtgtctatttacctttatattttcctcttagcacccagcacagagtccttcatagaagagcccttcagtttaggtttgttgaattgaactgaagctaactgattgataaaagtgctaactctggatacaggcagcaaaagcaatgcctccttctcgtggactttgagaatctgctttcacatgaaaagcagaaacaccactggggatcagagaagaagaggttcactagagctttgtggagtagaaaaatgctatatggtcaatgttgttctatgaatattaggaaattccattctgagatgaagtgtttctaacttctggggtgggatgaagggatctaaaatcgccaaaaagagactaagcacttcctttgcatccttatttagcacttgcacaatataaagatacacgtgtaattattgtcattattaacttcccttcgcttctagccagactgttcaaagcctcttgagtacggctcttctgctttgacaacttcaacctcatcttttcttgactctgcttttcctcctctctctccacagtttaatcagtatagcatgacttaaaatcatcaagctttctctctacacttttagactatatcactctgtttttaattgctgtcagttttccattcttacatttaagatgcaacattctggccctgccttcatttctaatttcagtttttcctatattcacatgtttcatttacccagcccctttccttcattctcctagtcctctagctgagctttttctctgttgaagccttcctttctttgctaggtaaatgcccttggatcactccaattctctgtaaagctcatgcctgtgaagccattccgggtgttccttcagttaggattatttgttactctgccaagaaaaaagacaaatgcacactcctcatgtgcctaaaacctttaaatgcattaaaagtcgatatttctgtatttcattgtctgacaaacagaaaacccccttcagacaagtagtgccttttgccttctacacttccagggtacatctggagattccgtgcaacacagaactgtaattgctccgtgtgcttgcatttccaaggcagtgctcagaattcgcagctgccccctagagactccaaggtaaactgcaggagcaatcaaaaggctgtgtcagctccataaatgcccaatcccttaatcctaaatctacccatttctaaggtatccattttagattttaagcagggaatgactctttttcgaactcatccgtgttctaggagttgcaaactccagtgtctgcaggggctaggtagataattaatgaaagaggtgggacacttgcagggggctgagatgaactggacagcatgtattccaaccaaaggcggccccgcagaatgtgaacgcagtgttgcccatcttctgatttttcaggaaatccagaatctggagttctatgggaatctgaatttttaaattttagaaaccaatttaatctttaaatataccttttaggccgtatagaacatgtcgatggcccaaaagtagtctgttgactgccagtttatgacctttcctatacaccctcaccaggtcccatgttgtgtcacattcgatggtacagggtcaactggagacaaggaagtgaagtaatttccgtaacagctgtgaaagaaagccaaaagatgccatgctcacttagaacagtaggctagagtaggtaactcactaaatgcagttcttattaaacaatgaaggttaatgcttcttgattttttggaaaaatcaagcataaatattgtaatgttcatagcctgatgtgacagattatataaatccatacccattctctaaaatctagcagcgagaaaaaaatgggagataaaatactactcatatttctcctgtggcctcaaagtgggcctgtagcctcaacacagaatctgtatacaatttaggcagaggacttgtggacataatttggaaagttcttacataagttgctagtgaaatttcttatgacagctgctgaacatactctgaagaaatttaactagcaacttatttaaaatgataaatctatcaaaagcccctttgagactggccttaagagtctgacagccactgcaccctgtcttaccaccttaagcgtatatggcactatctgaaatgatcatatgtattgatttgtttatatgtttgttgtctggccccactcaccaagacacaggctccttgaggaagggaacttgttggtcttgttcaatactgtttccccagcacctagaatagtgcccagcccttagtaggggctcgggaaaatattcgccaaatgcataaacccaatcggcctcgtgtcagggaatgtcttgagcaactacatgaagatatcaggtaattaagaatcttctggagtgagtagggcaggctttaactttttcttactgggctactggctctgtcctccactttatgaaaggataaagattcagttttattataaaattaatggctggaaaataaaatgagaacagagaacaatgacagagtggcagccttaaatatctattaagcagatacttctccttgtgaaaaggaaatgtctgtgatcagcggcccttatgttttataggtcaaaactcagattactgggcctcatccctagagcttctggtgtagaagctgagaatctgtacttctagtaggttccccggtgatgctaatgctgttggtccaggggccacactttgagaacctctgatgtaaactgtgaaacgctattcagttgtctgttgttaagaccattcaccactcccctcacctaccatttcaccgccatcccctttatgttcaactatgactaaccatgactatgggcatgtcttttgacattaaaccactttcccttgcagaaggaattttttttaatggttatgagctaatctatctgctgcagaataaggaagacataaagggaaaattggcaattctttaagatcaaccacaacatggtggtttattacagtgaaacaacacccaagtagatcaaatagcacaaggacacactataaggtttcataaactgtgattattgcttaatgtgttttggttgtaatttaatggttactgagaacccacaatgtgctatatcaaaactgaggggtttctaattgcctgatttctgagtgataggcccagcatgggctgctgtgctatgctgtagactttgtcagtattttattattaattaagactcaccttttaaaaatccctgtgcaaaaagtcattttagaatgaaggaaaaaagcttgctcatttcaaatttataactaggcacatcaaaaatctatatactgttttctagtttcttcctgttagtgactaaggccaaaacccaactagtttgtgtgtgtctttgtgtagttaagtatggtcaatttttccattttcctgttttctagaatctaatttcatttgtattatcattggtttaaaatgtgttcaagtaaaatgatagtgaacacgagagtagcacttgctacatgtcagatattgtgctaagaattttacatgaattataattttagttttaacaaaattaaaactttacagtttgaggtaggtgctattataatccccattttacagatgaagaaacaaaggcacagaaagggggaataatatttatttaaatttatttagataaatcactgcactgggcagaggtgaccaaaatatggtttctcttggtttttgaactgtgtgtcaaaagacaagttcaagaatccaaggtcaagagaaaagcataagacagggcttaaggcataaaagcacaagaggtgctggagaatagttagttgcaattattgggcatggaggctgaatgcagagaggtgaggagggaaaaggaagggaaggtgggtcaacctcaaacaccatgattttggggctggggtgggggagaagaacactttgccctgtggaaatgtttcccaaatttcattcattcaagtagtactgtaacaattttgccacatctgtataccacctatactaatttttgaaataatctttaagaatatatgtatcaaaaaattcgtatcattactataaatgtaagttgtgccacttcccaaaagtagaagataactataaaaatagatgattatttaaacaaaaaaatactcatcccttctgaattaactcaaatactacagttgaaattcacagccacatgtgaggaaacactgatgcagcaatgatgaatttgaagatcagtgttcttattgttgaattttattcctactttttctttcttatacttttttttaacttaattgagtttaatttatctcattttatgtaagatctcaaaactcctctcccttagctagttgagttcataaaatatttggttgcttgtgtttcaaataaagcagttaaattttcatgttactgtcccactaaggtttaagagctgtttttgtaggtcagctattttaaattcccctcagtgttttgacatttctctgcacctccaacagatgtctgatcaatggggctgcagggatacggtgccactgccatgatggttgattttagaaaagcttttaattcagaagatgactatttcctcgaaaatcccttccatgcaatgaggacctagacagctgtttctgtaggtagttatggcctttgtaattcaaagaaacatgttctttcctcacagtttgaggagataggttctgagttcctaactgaaaagagagggtgtgtgtgtgtttgtgtgtgtgtgtgtgtgtttgtgtgtgtgtgtgtgtgtgtgtgataacaggaattataagtatagaaagatacaagaaagctttctcccccctttatctttctttccctctctcctttccttcctttcttccttctatttttgctaatcacagaaaaatgttacactgaaatagccagtcacagtctgggctaaccagcctccacacctccagctccaccccagatgctggaccatttcttaacacgtagttttaaaactcaagtagcagggtctgcacatttctatagtgtgacttgtcctcttgtctatgaatttatccccattgacattgctacatttggatcccattagtctagttgtactcttatactccatgtattgaggcaaaaagcacactggacacaaacggagctagatgtaaatgtctacacccagctctgccactccttagctatgtgactttgggaaaatcatgtgacctctgatcctcaatttacttacatgtacaagtatttctcaacattttaataggaatcaaaatgggatcatatatgctaaatttgtccattaataacattgctaataacatgttacataaaagtcagatgtattcatggccaaatcttcctaatgtcccttaattccaggctagactgtctgatcatttatatgtctttcccagatcctatagggaaaatggaattttgtgttcacttttctataaagagaatgctgaggtgccttaaatattcactatgaattttacctcaaagggaatattctgttcctttgccagcaaacttcctttcctatgggatgaatgaagaaaaacgagtacatattatttcaggaagagtcaaagatgatgacctcagaagacatctgacagcaaacgcttgagctagaaaaacatggaaaggcatccaccagaagtttggtgtgagcaggaatgtggtgtgcacctggagaatagggcagtggagcacgggcttctttcccctcgaggtccatcactccctccccagtgactgccttctatgtgcactcttctccttccagggtcatactttctttctcaccattcccctggcacagatttgctttaagtttaaaccttcagaacagctagctgacagaactaagacctggaacgcctgtaaaaccagcaatgggccacctctatgacagcgaaggacacctggccacagaagagagagggagggtggaaggaaagtagaaaagctcctaagcaagccaccttaagacatctctgtcaggataaactaaaaggttcaccaaattatgagcagaaataaccctaacagagaaaattataaaatcaccctgaataatctgaatgctatggctgctgtgggaaatttatgttcatggtttttattaagagcttttattatttttaaattttatttttttgttgttgttggctattacttcctttaaaatgtttgtaccacaggctgcttggcagagttaacatgccaaggtcagagcttctcttcctgtatacatgaattatttctaccctgtttctggccagctctcataaataggtattgtggagatacagcctgtgcatggctggtacaaatccatcatcactgcaggaaaaactcaacgcataagatcttcgggtgctagatcaataaaggcatgtttgcatatgaaggacaatcaggtattttagctttaatgccaaacttcaggtcttagctaaagtcaatatgctattaatataggcacaaagtagcttgtttggtgaaaaatatgtaaaggtatttttataatatactgctatagcagcaagtcaggtatgttctatccctactggtgaaagaagggcattgctctctcccttctgggtcatgtatgaaccacagaatagaaacagcgctggaaagggtctcatactgagcagtagtcatatgactccttgggaacgtgagtctgaattttacaagccctcaactttcaagaaaatgaaaccaacatgatgaaaaatgcagacagacatggaacacatggacaaccccattctctgtgatgtaactaccaaagataagaaatacatatctcaacaaagttagaaggcagcgcactgtatgagaagatcaaaaagagaaaaccctctgggactcctagcagacccgaaataacaaaggacagccttccaccagactgcatatgtgtcccctgattgttccagaatcgatataaacaaaccaattcccaaattaagggttttcatttttaacatttagggacattggatacaaaaaaaaggggacaaatcttctcactttaaaaagcaatcttatggcatcacagttagaccaccaactctgaaattattttcatatgagaaccagagtttctatttaacatgcatatgaatgtctaatcatagggaaccagtttgaagaagcatgttatattctcacagtgtaatattcggcattaagtttcatgcttttgaaaaacatttaataaaaagggaacatgtcctcaatatcctaggaagagaaaaaagtagattgcaaattatccatacattaagatgccaattctgttgtattattctgtattgtattacagtgtacacacagaatgcacagaaaaaaaacactggaaagaaattttaaaatataactgctaattctttgtaggtgcagatatgggtaaattttattttatcccttcaaatgtctttaataaacattaattacctacataataagaaaatcataaatgttgtttttaacctagatataaacatagaattttctcatctctctaccactctttcttcttcaacaccagtactggaaaagcattgtaaaataaaaattagaaaaaattgtttagaggactcagggacaaaccacagataactgtcatgaaacaaaaatctcaataacatttaaatgagatggatgaaagccatcttttggctttgggaacactttccttttcactgtttttcctgaagccaaggttaggccagcacttcttcagtctctgaattcaattctgctttctctgtccatcagcatgtacaggtttcaaaagtaaagtcaaccaaggttatcttgttcttttatccttttcattcagtggctgttgacaagcactggaaggcaaccagcctttctgaaatgatattccaaagtctattcccccaatacatcctgctcttctctttgaattatttcataaatgtgcatgggagtagcagcttgacattttggactgagcctacagcagtgttgagactttagggattaacagcacacctctacctcctcctctccatggctgcctcctgtaatctctttctggaaccctggagaatggtgtagtcaaacaggatgggccagggctcttggagctcagtgaacaaggaaacatctggatgtgagggtctgcactaatcacaactcagaaaaacacaacaaaatatgtaatccagtggccccgtgtcattgtcgtaagtaaaacacacattaatggagtctttactaatgaacatcaacccaatgttagatggtatcaaatagtaagatttaaaaatcaccttagtttatagaaatgttaaacatcacaacaagcactttttttattgcaatgtacttgttttgtttttcccagccaccaggaaagctatgatacaaatttgtgggggcagtccttggctcatgataggtgcttaataattatgtgtgagaaggaaagaaggaatgaagaaggaaaaggaaagagaaagaaggagaagtaaaaaggaagagaggggcggttggaaggggagggagaggaggtggagagggaatggaggggaggtggggaggggagggaggggaggtggggagatagggaggataagccatttagttcacgcattgttgcttgcacgggactgtacattacagagagacaaggacatatacaattttgaggactttcaaagtcatcccctggtgttgttaacagttccagtactcaacacttctctctgttaagaaattctccctttagctaatataaaccctctctgcttgatcttaagcccactcactctggttgtgtctcagaggagaaagtgaacagctgatctccacacttggtacaattattcttcacacatttaaagagaataagtcatcacctcattgccttttttttctttcccttaacaaccccaattcccatagcctttctccatggatcctgtcttctaatcccttaatccaatgatgcatattagtactcagttcaaagtcagtaaaaatagcatgttgtcaaacggtggtatcaggagatcctgaataaacacgcttgccatgaggagcttctgtttcacccccttagatgccttctgtagagcctggagagagcatgaatatcccctggcctctcctctgaggctgggaggtggaacaaagtctgtccagctgtgcccaagcagtcaccaacactgcacttactggcctgctcagtgatgtctcacaccatgctaggcacagaggtatagtggagaggcacacagatgtgccagtttcttctgagtgagtgaatatgtatgagcggggatggaggagctgttttattttgccagtcaaaagctttcaagtaatatcaatagaggtagtgattgacctctattgtataaacactgatttgatcattgtggactatgatcaccatagtccttaggggctaggatcacagagcccccacaccctggagttggtgctacctcctggacatgaggtcaccagagacacagcgtcccttagcctgtcttatttattccaggctgcagatactggcagagcattctgttttactacattttcattgcttcagctcttgtgggggtctcccttttctcggtttggttgcactccttccctccagttgatccatccattaattcctgagtactatcatgggttcaaaactgtgtgccatgcactttcatttctagtctctcctttactggtggatgtggctgtgacatctcagagttgaaagccatagatggaaacaggtttggggagtccagagaacgatctacacaaactgaaaatgtttttaatctacataaggaagggagttttctggtaggtggaggcagggaagagggagtgggcttataaaacaccctcttgtctctttctgaaaaagataagcagagatgcaaatcttacatattctcctttaattctgacccagacagtccctttaaggtctgtttacatctcagagcccaaaaatgcaccatcatcatttcttgaagtcattactcagagcacacccccactgcatttcatttttattatcaccattttaggaacgattaaatggaagcagagagcagtagcaatgaagcaaatcatgagaggctctgatagagacagaagccttaaagcttgttggaactgcatctctgtgccagactatttttaaagcaagtttatgcagctgtcccccacttaggagccttacaaatgagcccagtctgcacacaatgattttttttttcaccatttctaccctttccaactcaccatgctatgtctgcatgcatatgtgtgtgtaaaatatttctttttaaatgtccttctccacattcctacataccagggagatgttcttggctttctgtgaatcaaattctgatccagagatctctttgctattctagccccctaagcctccaagaggttccttacataggatcccattaaaggttcacaagagcagatactgttcatttttttattaaagtagttgggtaaatgtatcaaatctgtaaatgtttggagtattttcagaggagtacataagaaattggcaataacaattgctctggggaggattccagagactgggaacagcattgctctggagagggaagcaaagggtcatagatgagaagaggactttctttttactggatactcttttgtgccatttgattttttaccatgtgcaaatattaccttaaaaattacacaagaagggtattgactaccaattgacatttgttggagactgactgtttcagtgactattcactgatgtttgactgtaaaacctctttgaatctttacaacagccttatgtaaaaccctatgttacaaactcaggtagtatccatcactagctgataaatggcaacatggagaactgaactcagttctgatttccaaaaccacagactatgttgtgttgacttcaagtcttcccaagggaacaaaatgtgtaagactgtagcattgggactacttttaggaacctaaaggaacattgggaagtcgtatcacatggttcacaccaacaacttaatcttccttgacccgagatgccttgttaaaagctggtcacacatgtatgactccactgggagttgggcctccctgacaattccccccaagtccttccctggcactggggtgctcactccagaggaggggaagttacctgttcccatgctgtctccagtaaacttctatgtctaaatgggagattttcagggtagaagtgaaatagcttgtcaatattctagttctcctaagcatacagattcttcatttatttagcaattatcttttgagtggtccagacactgaaggcaagcactcttctgaagggtcagaattacagaggtgagcaaggtccttgcccccaggaagcatccatcctggtgtgaagaggcaggcaataaacaaacaagcaagcaagtaagcaaaacgccagataatgagtgtattcaggaaaattaaaatctactgttagacagtgtgacggggtgactacctcatcatgggtcattaggagggcctttctggagaaatatttacttaaatgacaggaatgacaaatatgtcctaggagctatgcccttcaaaacaagctcaggttcctgtgtgttccatccctcacccaatttcttttccaatctgctatttatttgcaaggagattttgcagtcccagaagttagcactagaaaggacccaagaagtcttcttagtcccatgccatcattttagagatgagaaaagaaaaatgtagaaaagtgaaaaaagcaggtcctatggctagttagtggcctgaccagtggctgacagtcctatctgtagcccatatttcttccacaaacccacattcctcccctgcttatctgtccagtgttcaaatcctccctgtagaatcttcaccctggtgcctgcctccctggagtccactgacactaaatcctccctggaccaaggggactttctgaagcagcattaggcgtcttgaggatgatgtcctggggacgaggataacagtggaaggaccaatacaactttccatgatgcaatctcaccacaacccagccattccctggagccacacctggctcctgccatcctccctgcccacaggtgagccctaatagaagccttcaagttggggagctacatggctctatgacctcaatgaacactagacatctatcttccaaagtgttccctgggttaattgagtcgatatgaaaatgttctattctattatctcaacccctcccaaatgccctacaaaaagattaaccacagaattcctttaaacagcaacttcctttagtacatgtaaagtatgatctacaaaaattcaatctacacaaatattttctcctgcccctccccatgaaacaacagctaccgtatcaagggcaacaacataaacttggattcttaatggtagattttgggattcttttattatgtaatgattctcatacatgctacaaatatttattgaactgctctatgaaatacgcccttacaggttgctgtgaggacacaattgagctaaagacacagcctctgccctttggaagcttgcatatggacaactctaacaagaggcagatgtgatgggtgctaccacagacgtatggacaaaatctataggggacaagggagtgtgagattttatctcagtcaaagatgaggggaggaagctgcaacattttaattgggtttcaaaggatggttatgattatataattggataattcattctaggaagacacatcatgacatgtacaggggacgggacctacaaaggcacattctcagaacaagaagaagcccagggtagcttaattgtgagacaggaaatcatgaggaggagaataaaggcttggaaggcagaccagagccttgaatgcaagaacagatcaagtctagccccagtccataaaccatagaaggctcaagttggctttgggcagagaaggaacatcacagtcagaattgtgcttcaggaagctcattctggcagccatattttggactaatctgaaggagtaaaggcaggtaccagggacaaggaggcccatttaaaaaattgtcacatagtccctggatcatatataaagtaaagaataaattcaagagctagaataaaaatagaattggtgagggaagggatccaaaccctaggaagtagggtctagttctagaaaggggtaggggatgcaggcctcagattctggactcaagaagaggagtcaatatgacctgatggtgagtggtgtctctttaagaaaaggctgttgtgagatgcctcctcctgcttgagacagtaattgtgagcctactgcaaagaaagctgccccctctgtacatcttatgagctacctatgaagcctcagttattaatagttcctcttctagagacagacagaagtgcctgttatacatgaagaacccagaacatttcttaaattatgacatctctacagcagcagtgaaagcagcttgattgtagtgaaaagcagaagcccagggaacaaccatttctgaacaaatgataactcagtggagggagggcaactttaatcaagaacatcaggcaggccaagcgcagtggcacacacctgtaattccagtgctttgggaggctgaggcagaaggatcacttgaggccaggagttcaagaccagcctgggcaacatagtgagacctcatttctaccaaaaatttgaaagttggccaggcatggtgatacacacctatagtcccagctacttgggaggctgagctggaaggacaggttgagcccaggattttgaggttgcagtgagctatgacagcaccactgcactctagtctgagtgacagaatgagaccctgtctcaaaagaataagattaaataaaaagctggcataatttaagccttataattgtgccctatctgacaagagaaaatgcatgatagattgaggtctttcaacttgaagaattagatcctggattctactgcctgagccacacatgcctagtttctcgggtgagcattcacacattcacataactagctgtccagggctctctgtgatgaggttgtgaatttcaagaagtttatctctggcctcattttctggtaactctctctagaaatatatagctggatttccattctaggcagaactatgctaacattttgaagcccattctcagccaattggtccatggaatctgtggaagttgtcttaaatcagtttcccaacatgttttcacagaatatgaatatcatgaacaaaggggtctcaaggtagaataattttaggaaattccattctaaataaaagtaaagatgtttctttgctataagacacctctgaacttccaagggttagtatgttccaagactctcctagagtgagaaacagtaggtagcatctcccaaccttatgtatctgtaaagctatttttcagcaaaatgtcttgagagacaagagcactgcagaacatatttggagaaaaatcagtgatgacattactctcaggaatacttgtattcaactgggaatctggaataataaaaaattgtaatactaattgagtgcttactatgaaccaggcaactttctaaatactttacgtatacttcatccttatacctgttggtactattattattattttccttctctagatgagaaaactgaggcatcaagtagtgaagagatttgtctaagatcctacatagagctgggaattggacctagacagtctggtgcccacagaaattaatttctgatggtagaatttcaaacactgtgatcaactggcagtgggagagattgagcagagccttgcatgggaatccttcaatcacaataagtctaaacctttcttctcataaattcatctttataagcttcccagatgctctctaggacacaactcctgaactataccactaattcagtttcttcaccaaattatgttatattgtacacacatactctcccacaaaaacaaagtcaagattcagacagcaatgcaattatcaacaataaatggtaatacacaaagaaaacaatcccttgattaaccaaaatagcaagtaaatgaacatgcaagtttgagaaatggcttctcctgtgtatcaaggtattgatcccttgctccacaggtctagggacaaaagccaaaggactactttccttcattgtgttgcaaaatttcacatttctactctactttgctcaagaattgtcaaagacatgtcttaccctttcccacttcctctccttgttcagaagaattatcaccagtttcgggtgcatctggtagccatcttcactgaaggacaaattcctcccctcaaaagtgacattgatcagatacctgtaaagataaaataaaaggaagattaaaagtatgaagagggtataccatgaacaaggcagtcaggtatatagagagaaagctggctggagacagacaagtaaatagaaatacagataccattatcaaatttggtacttcttgaactcgcatttgattatgcaatagagtcatccaagttttcacatagtaggaatcacatgaaaaagtaatataaaaattttaaataaaagatgtttggtcaccgcatgttctcacttacaagtgggagctgaacaatgtgaacacatagacacagggaggggaacaagacacactggggcctgtaggcagggaagtggggagagggagagcatcaggaaaaacagcaaatgcatgctgggcttaatatttaggtgatgggttgataggtgcagcaaatcaccatgtcacaagtttacctataaaatgaacctgcacatcctgcacatgtaccccagaacttaaaattaaaaataaaaatttttaaaaaggtgtttggtttaagttcagcctagaggtatgactttgagcaaattactcagcctttttgagcctctgtgtttttccctatcagtgaaaactaggttaataaagggacctacttcattaggtttgtaaggcttaaaggggataacttaggttaaccacttaccatgcggcctggtgcatagtagagtctcattaagtgctaacaattgctatcaaaaaacaaaggtggattaaaggttggaagtggtggagataagaaatgaaagtaggagtgtaccaagacaactttctgctaacagaggtggcatgtaggagcctagagtctccctctatcccagagatatgcacatactctttaactcttgctaaggtcttgccaagcccatacttctaagagttgtgagatgagtacagtaagcagggatctgatatgacaggatgcatctggaaatcagggctattacactatgtatagggaacagaaaatactaaggaatgggaaaaggtgggaaagggatttcacagagtgctctggttacttgtgcatagattagcagaaactctggaggtaactagagtcagaccaatgaaactgtcttcctcccggacaccttcacctcagcccacccttttcccctctggctgctgtcatctgatgagcagtcccttcactgggaattcccaaaggcatgctcattacaactgcattagtgcaactgcactgatggtaattaatgtctttttaccataatggcccaaggaatcaataatgattagctctgtgttcatatgacatgttactctggagccttgggcttaatgtttcttgtgagaccatgtccctgctaagaagcaaaaggggtatcttgtaactgcagtgaggatgctaaaggaggcagcttgaagactctttttttaactcctctcattcaatgaaactgggaggtcttctttgattcttccaggtaacattaggttaaacaaccaggttgctaggatgcatattcttctggtgattctaatgatgcttatgcagcatgaatcaaaccctcatggatcacttctcatttccagaactacctgggatgtttaagcctgtcattccctggtcctgtgtagcttcacaaatgcaatcaagaacacagaagatcccaaaggagtagcgattcctagaatcttagaattgaaagagattttcacaatcaactagcctaccacttcttacagtttatgcttcccttctatatcataatattggtcttcttagctcttcttgaattctttcactgatggggaacttttaatggcaccttctgggctcaaggtaggcatctcggtgttggctacttagttctttcttacttaaagctgaaacctcctcccctgcaaccctttgatacatgtttcctctttagagattctacagtcttagtctaatccttcttctacatgagagtttctcaagtatttgaagacatttatcatacatcccttatgaaatcaattttactctttaaagacctgttaaactcttttagttccgtaattttaacttgatggattaaaaaacaagcacaaggaggttaaattattttccaatgttattgtatggcagatgcacctgacagcaataacttatgcataccctgagaatgaccctactgtctaagaaaaatgttcagagtcctaagctaagaaatcttggaatagccaacccagagattcactttttatctatgaaggacatctaaacccccagttcatctgctggaatgcaggccatacagggaatcagagccctttgttttgggttaaatgaacgtttaggtgaacattgctaagtgaaaatgctatataaactgcatgcattttacaaatggtagcagttctcctgtccagcccaccaccactggattgtccttgtatgtaagtttccccagtaaatcctatgtctcattcattatctctgggtctcttcttaggcctttcagatatggtgccatcgctattggagtcaacaagggtccagtatgaccgttacacagctaattgggagcagaagtaacattttaagcaatatctccagtttcatgtcctttcctgacaccagcctgattctcatatacaacatcagacttagcatcccaaggcctttacatattcctcatatgccatggcttcgtgttttctaccatcccaccttggctgctctctccagacacctccactcagtgacatgtagcatccccaacacaactcaatgctcaatctgctccacttcttgccctgttcctcagctctcagcccagagcggctcacccaagcccatcattagtgtgaaggtaatattcaggtctcttatagtttgcaatgactctaacactccaaccaaaggccctgaagaattcattgcatagaatataattacaaaaccatgagacaggatattttaaaccaacaaactagaatataagcactaatataatatacttgaaaatgtattcttactacaaagaccctgaacaatttctggagtcttcaaataaagtttatgagacatgtaaaacaatttggtctcatctattttgaaaggaggaaggaaagaaggaaaaaggaagaaaaggaaagaggaaggaaagaaggaaaaaggaagaaaaggaaagaggaaggaaagaaagagaggaaaaggaggaaggaagagagagatggaggagagaggggtaaggaagaagaaggataggagggaaataaattatctggtgtaagcatccaccttgttatcagacactgtgctgaataattctgcctttagctaaaacaccattaagaatatttaaaggaaagtatctatttcagaaggcaattacaaaagagaagttccaaaaataattcaattaataagcaacatcaatggaataactatatagcctctcaagatgacttctttgaaggggacagcattgaattaggtgtacaagttgagaaatttgaacttgcagaaaataaatcacactcatgagcaatgtaattggtctgtaaatttttctggctattcctgttccagcgccttctgattttccttagaaattgttctctttctggggtgctcctcctcttccagctctaagttcattttatctacctaagcactcctcacatattttacacttatcaaaaacattagtaaaattttatgacaatatacaaaatattcttctccaaagtatcctttcatcattcatatctgtcagcagcatatagattaatcattcacactgtgttttcatgagtaatttcttgtggtgtgagaacatttagccattactgaggagcatgcaaatatacatcagccttgagcaagatgccctttgaatagcagaacaaacccatccattcactggtaatgaaaagtgtgaaaaaataattgggggtgtggtcacttctagacatgtgatcttggcacctgaatctcagttattcttctctaaaatggagacatcattttacttccagcttatcagagaagtctgttgtgatgaccaaatgaaagagtggataggaaaactatataaaatatgatacaaatataaggttatttaataggaaaaattcagaaaaagaatatattagcataatttgagagtctaaaggcaagaaagttgcttgattttaaacctcagtgaataagtgtgataaccacattttaacaagactcaattatcaatgaaatacatctgaaaaatggagattggcttctacatatggaggctaaactagatcaaatggctatattaatcaatttaactttccataagacctgaaaatatccaactacccttggatctggctgtactttgtcgatttttaatattaattagaacctcgaaacgttcatgtgtgaatcctgggtaaaggattaaattataattaagagatgccatagctattctatttctctccaaacatgtcatcctcaagtacacagtcaaaaagctttgcttcaagtggcagccaaatgcagaagttctgcccatgagactcaaatcccctggaagtcccatcaaggttgtgtgtgtgtgtgtgtgtgtgtgtgtgtgtgtgtgtgtgtgtgtgtgtattttaaattgcttgatttgtctctagaatgtagtttgaaccttaagaaaccagatggtctgcctcatatagttctaatattacacagaatctcacattgctaaaactaggagagaacttagaaattatccatagagaaccttcattttagagaggagaaaataggtcccaagatgcaaaacaactttgccaaggtgacctgcctgttcaggactggagcttaagtcttctgactctcagctcagggtccttccatgatcaccaagtgaagtaaaatcagttccacagagctccagatgtgcattttagcattcttgaatcacatggcacatcctggactatatagatccctaatacagactgcataaaacaaaatctatcttagatgattaatctacctgcttgcctgcttgttgagaaagagcctcagaatcctgatgggctcagagccaatacatttgctttatatggccaaagtcacaccacagtgagcttaatgggatcaggctaaggttaaagagcccttctgcctctctgactctggccatgccactccaagctcatctactgcaccacgttgatacccacagcaatgatttagcggcataccttgagtgggaggcactcgaaggagctctaccagaattttcccagccaaccaacagccctagaactacagtacttactttaccccgcatgtctttacaagcactagatttttaaaattaatatctgctaatgtgtcaatcagagaagagatagcatctcatttcatccaatcttttcatcttcagatgaaacagacaaagcccagcagggcttttgtgattagatgacaaggctgagaataggacccaggtgtcctaacccctagtccggtgttctttccatgtgccaccatgcttttaaaaagtggcggtttttcatatctctcattttccttctctagctattaaaagtaaagtgataaaagaacacagttccaggcaagggacaaattcttgaccccctctttttttgcaattttctggctctgaaaagctgtaactctgtaactttgtatcatgcatgtgtcaccttctaaagccttcagcttcctcatctataaaacaggtggttcataccatcttacttgtctggtgtgagaagctacagggaggatcctttgacctgttgtttatctctacatttcttttcttcttttttaaacatagtttttagtgtgtatatgtaaggtatccaacatgattttatgggatacatatagatagtaaaaaagattactctagtgaagcaaattaacttatcacctcacatttcatctgattaatactgttcttagtaatattgctataattctgttattattagctgctgttattactctctaccatgtgaatggaaaaaacacaattcttttgaaagactagagtttctttttagaaattatgattatttatacacagtacctctagaaatagtagaaacaatttcccaaaggattagaaatagtggacttaaaacttttaaaagctacctaattacagactggtattggagaaaagaggcaaagatatttaaaaattagattttcagtgttctagtttagatagactaaacagaaatttctgaatttttcccagctaagaaattcataattatcaaaataaatccaaaatgattaatccagtttagcgtggtcaacatggcaggcaagattattacaatctggtcaacaatgtcctctttttaaggaagaaggatttgaagaagttttaaatgattcctttgagatatgtcatatataaaaatattaaactctgtggttggacaatataattagaaatgccagtttcctaagctgttcttttaggcaaaatgataccttgtagagaagctcaggaataactaatttaaagagcagactgtaatattagtttatgtttacttgagatgggttaaaaatagtttgtcttccagtggataacacattttctctgaaatggtgtttataccattaatttattttgcaaaccattcttcacaaatcataaaatgttcaagtttgggctagttcatatcacagttatttaaattctaaattagtggtgttaagttaatgagatatattaaagtatcttaaattctaaattagtggtgttaagttaatgagatattaaagtatcttgaacagtgattgatacaaatttaatatacctcttatctcctactggtggtgagaaatgtgctttagccccttagtagtttgggctgaactgaattcatgagaggtgtaagtggcaatgtgtaaattcaccatctattatgaagaaaaagtgctttcagcccccttggcctaacaataaaaaatttcagagagctattacctggattctgtttcacaactgaataccatgaattagtttaatctgcaatgaaagaaaacagaggaggactgatataagaaggtagagaacattaacctccctccagaaagatgctgtctttggccaattatcaaagcaatgagaattttaaggagttctgtcaccagctgtgataacctcctatctatgccacctttcaccaagcagggtcaatgtggcaggccatggctagggaacaatgctctctagacttacctacgggtccatctgggatgaaatggaggaactcattctcattagtaagatattctcattcaaatgaatgaaaaaaatctggacaatgccccaaaatgcttagtggtgagaggtgaatagaaagaaaataaaggggagaaacagtaactaaagagggaaagaatacagtgtatataacacacgtacacactcatactgcaacaggcagtgtagcgaggtgtttaagaacaagggcacagttcttaaacagtgtaatagtcacagtctccattcaaatcctgcacccaccagttctgaagctgtgtggtcttgcaagttatttaacctctctttccttattttcttcaccataaaaaatataaataataatattacctatctcataggattgttgtgtttcgatatatataaaggggatgtgagggtgatctggctgcggcatctgtcactccatcgattgccagggttgattcagctgatctggctggctaggcgggtgtccccttcctccctcactactccatgtgcatccgtccctaagctgcaggctcagtggaagaggatgaccattcccaataaaggaggaccggtcttcggtcaagggtatgtgagtagctgggcttccattctagaacctccaaacaagctctcaacatatataaaggacttagaattctccctatcacagagtaagcattatgtattagttgttattattattacctattttttacattgcctgggtgtcaggggagttagcatttgaagggacttttggatcacagtctaactgttcatatttagagctgaacactctgaagcttgggacaatgatgtcatgctttggcccatttagttgagtctgggtctcctaattcctggatctctgtttttccataatactaccagttcagtatattctctctcattcctataacatccaaaactattaaggcttgggaatatttgttttgttcttactatgattagttacccctgtgaggtttttttgcagtgggcagtcactaaatcataccacttcaatataaagttcactttccaaggaaggcaaaagatgtgctcatacctccataattttagtctagaataaatgattcctcaaaatgatcccccttctgacctcccagatccctgctttgaacactatgtaattctctttaaaatccctttggagagaacacattcttgattatgtgtgaaggtaccacacttccttagggaactagtgaggctgccttttgatgccaattaatcaaatgtgcagaataccaaagttgcttctcatttagctctacgcacagaactcagtgatgaaaaatgaaattcctctttgtgctcatgctcacgactcttagtcacctctactataggtgagacctggtaaggtgctacaggaaagccagacttattagacaatgctagaaaggtagaaatccccagagagaagaaaccaagtagcttttctgcataatgttactgtcactggattatttttccttttagttcatatttccatgctgtatataagttaaaatcactttcttaaaacactgaataaaattcctttcttcttccagagattaggtgttcagtatgttggaatgcagcccagagtaggtaggctatcaaaactaagtggtgagaccttcccagagaaaataccaaggcagatcaaaggctagctgatcactgactacgttatctcttttttgtgactattaataattttaaggtgaaggcttgtctttctgacatccattttagctcacaggctggaaaaactattcaggggctatgtaaacaatgactggcaaagatttctctaggacattcaactatggcaggaagactttccttcctgtgaactttcaggcctactgaaagaatgtactcaaggcctactgagcatatgtactcaagaagcccttgggtaagaacctaaagtgacctaggtatgatatcaacggaaaagaataagaaggcttttctctcccttttgatctttctccatttcctcaatttgtcctttctgtagcctctctctacttcctcttacacattgggtggtcaacaaaatcaacacacaggaaatatctccatacacacagttcctgccccatctgtagctaccatatttttgacttcacaattccctctaacagctctgccaaagggggcaaaatggtagatgaatatatgatgagttggtgatggcttcacttacagggctggagagtggaagttatgaagaattgtcactcatggaaaaagaaggttataatttagttttccagtaatggttggcagagttcttcaagtgaagatttatagaagtgattatgttgaattgggaggaggagagggtcaaaggagggaggatcttccagggtcaaggggacatttccaacagagagaagactcaagatgcctgggtgaagattatgtctttaggggagacaggcatgtcatgctatgtatgtgagacagagagagtggtggaagctgttgactcattcaaaaacatatctctgacttcagaaaacccagtcataaaccacacctaccatacagataaaatcctttcacatagggaacgaaatcatttctcccaaggaaagaccagagtaatgagagagatgcaaagtggaatataatctgggaatggagaaagtgaactgacaggaagatttgtttgcaataaggagtttgttaacgtggttcctgtagcacattctggagaacagctttctgggctacagttcagtgagatgaacagtctctaacagtagggttggttttaagggtacaggaaatttgtactagatggcagtgaaagggatattatggatctgaaaactgtgaagccaaatgtgtacataatcaaagaaaatacatctagatgagaaaaaccacaatgcaaaagtgctggtcaaaagttatcagtcaaacccacatcttatatttctagagtttctttaagtttcactctaacgcagtacattatggcactgtttctagaccaggttagaataaagaggttggggaagatcaaatttatttatgtatttagttaaagatatccattgatcttttccaatattctaaaatgagattgacccttgagtcagaatttcaagcaagatgaggccaagagtttcttcaaaccaaaccccatttccttcttttctcatcctcaagaggacagcaccatgaaccccaattgcatcttcactgggaagctgaaagaaacgtgtaatcatctctccctgctgtactgtgtgggggctagaactctgctgttccttctttgtcaggggatcctagctctttctctccctctgtaggttgatgtttccatggaaacatgctctttaatgcttctgaaattactgtgcatttataccattaactcttttttgaccagggcaaatcacaaagagatttttcaacccctatgaaaaagtaattttattttctatctcttcttactgggaactttttaaaaaagtaattggcgcctgatgaccctatttcctccccagacttcactccttaacccttgtaatctttgcttttgcctctcttttctactgaaactatcacagctgcaaaatcatcaataatcaaacaaggttgatatgatttggctgtctgtccatccaagcaaggatgtgtgtcccctccaaacctcatgttgaaatttgaaccccaatattggaggtggagcctaatggaagctgtttgggtcatgaaaagattaatgccctcccttggggataagttccttctttatcaggtcccatgagaaccagttgttaaaaagagtctgggtgcacccccctccccgaccttgcttcttctctcaccatgtgatctctcaacatgcagtgtctctttcaccttcccccacgagtagaagcagactgaggcccccatcagaggcagatgcccaatattgaactttccagccatcagcatcatcaaaaagtaaacctttttcctttacaaattaccagccttgagttttctttatagcaacacaaaataaactaagacaaagatcaacaaaaataaaatcagtagcctttgctgtatcatcattctcctaagtgttctatagtctctaacagttgatactcccagttttttttagcaagtcccttttttgtactttattatttaaagtaggataatatcttggttctccttatacaactcaggctagtcatctctccattttttctccactttgacttgaaactccccaatttgggggtatgccaaggttcagttttgagcccatattgtctccctctgagatgcattcacagccataacatcaacaatcatgccaaggtctccaaaatccctatcataggttccaccaattccctgaccttcagctcaatatttctgattggaatgttctacttgaatgctcagatcaaacttaacatgaccaagtccaagccaggttcccctgtgtctttagacaatgagaccaccacacttacagctttaaaactgttacagctttgtcttctctctttctgttataatttcatctttaacacatgaatgaaaggaagaattagctggctgctcttaggcactggattcccaggatgaatcaaatcaattaaaagtcaactgtagtttagcttcatgtacaaaatatgctgactgacatttttcccctcttcagcacatagtttcagaactttgtctccacaaggtaaatgaatctcatagctttctgatctataagtgaagttgcttggaagtcttatttctgctctggctgctcaattttttaaaaaacccaacaatgttaccatttattgagcacatgcctagccttgtttttggtgctttacattattttacattctcacatcaatgatataaaataataggtaaatactataatgaaggcccaaggttgggagcactgggagttgaatccatccacttctgaatgattctaaagcccattttccttccaatgccccacgctaagaacaatgttgtcaagagaagcaatggtcagtagagaagaaaagaaagaagccacaaacttctaagatggtagaactaaaattcaaatccagatctgaatggctccaagccctaggctcttgattatgatttatacaccaaccagtggtccatcagttgttttaaattgtccctgatgccatcaccataaagaggcctacaggaaagtcaactaaacacacaggctttttacagccctaagagagaccagaggcacattactggtaaggagctatgttcataggataattagagaaccccagtctctaagggctgtcaatctgtcatatttcacaagcactaacccaaaaaagtgaagaaattgaatgaatttgccttataaaaaaacaggagaaaaaccacacagcagtaagcttgactggacttatagaggaattaattcttagatcgtgctctggaaggaagtcagttatgaaagtctaagactgaattcttggagttcttgttaaaggcagacaataagagctagaatatttatttggtttggttaatagtgacaaaaacttatcctgctttggcacagaatatccaaattctctctggacttaaaaatacaatattaaagtatttctttggagctatagtcaactctcaattgccctcaataggacaggctgatcttcacttatgatctggacaatcaaatacataaattagtctcagtacttaccctgtttgatctctccacagattcacaccgtagaatagctccttcctttgaaattgctttctgtctagatactaccatgctatgttatcttagttctcctccttcatctgtgatttctccttctttactggatgcctttatcttttctcttattttactttttaaaggaaattcaaaacaggctgtttatttctcattttatgcagatatcagccattcccatggcacaaactcttcttctaagtggattagtccaattcttctcctccaggtctgacctcttattccccatttccatcctttgccagtcatctccacttgcatttatccctattacaaactcttagtgcctgaaattgattggctttatctttgctctcaaaatagctgactttcaattcttcctctctctcaatgagttaaaacttatgaagcacttggaaaggtgcctggcacatagtaggcactcagtaaatattaactagccttattcctttagtcttgaaatcttccagctgtctccaacatttttcttttaatttcccatgcccaatccatcctccaaaacttccctttctttacaaaatgattcttacatttgtcccttcttttctactccctaaatgtttaccctagaccaggcatatatccactcatacccagatacttgcaacagcctcctcctgggccctttgccttatatcattgccaccctccccaatactatccccatttaatcttaccgtgagatttcttagtgccacatcactacttgctcaaacatctccaatggctccgcactgcctagagccaaagtctgctctcagcaaaggatctctacaccctggtcccttctacctgtttggaattctctcatctttacatgaactcttgctgaagccaagaaccatctttgctgtcccctgacaaacattatttacactttctgcctcttccattttctctcaattgagcataatccaactcttgctcatgcttatggactcagatcaaatcttatcctctctctacactttcctatcaatctgaggccttctcccctcttctctcctcttgtcttatcttgcctccagtccacatttcaacatttcatttattgttcacttgacttgttctgttcccttttattacttaattttttacttgtctgtatcttgtcttccatgatagacaacatactatttaaaggtaaaaatcaaatctcgtccttctgttatcctttgcagaacccaaactagtatcttgcttgtggtaagtattcaataatacttattgatttgtttttcacttgcagaagactagtgttgaaatcctcccatgctacttcctcacttctcattcccacccacaccccttctatgtcacaccacacacacacacacacacacacacacacacatgcacacgcacaatctatttacaaatacttttttttgcctctctctctctctctctcacacacacacacacacacacatgcaactggcattgagtactggttccctgtggaagaaagtaattcctccaattattaatttaaaaaaagaataaattctaaagaatatattatctataatctttcttttctaaagaatgagatgaaagtttggattgacttcattcttgcccagactctttttaaacttctcccttttgatgtttttctcattacactgccataaaaacatagatctgcctgtgaggatcatgtaatctacccaaatccttattctctccatggtattgtgcccttggagagagctgacacaggagtgaacataattaatgatcggtagagaaatcaaaagcgatttctctttgtttctgaaatattttattccgtaagaaagaaaaataaataaaatttcttgatattgcagtttgtggctatgatttttttagtttagaaactcaaagcattgggggaatctgaaatatatgttaaaattaatatgtgaatattctttactaacgtaaatcattttgtcagtttggaaagaaatgaaatcaaattcatcttacttataacattgagatgaggaggtcttttaagagaaactagaaaaacaaaagggacatttattcattatttttttctagtacttttcaatttttgaggaaaattaaaatatcctcagtggagaagaggaataatctttttctcaatcttcacatggttaggtgcacataactacaaaatcccattctcactccttcccactcctcactccctacacacatcacagcaaggtgagggtgaatagttgatattcacactaagatcttctctacatttggcccaactcttaataacccaggatgtcagtatcttcagagagtccctgtgggtccatgcaaataatgcctgaagtgaatatttcatggctgggaaattaagagttgaggatagttcagaaatttcttgtttgtagataacaccaggacatgatgaagtagttcaggtggaaatcagaaaggtattatgaataagtctctctgaaccacagtaaagacttaatccctgtgaaagcaaaggaagttaatttgattaccacttgcttgaattccctcaaattcttgggcatcctagcataacctacaggaatttagcatttcagtcaatttctttacccccttttccagtcattaccaggttgctttgattatattaagttaaaaacacattcgatatgattggggaaaggaagcaaaatagcttgaagaaatacagtgtttgatgtcttcaattacaaagggggttggggtgagtgtagaagagatagaaatgtgagagaacaagcacacactagagagaaatgaagagatggagaggagatgaaacagcatgcagcatgctggataacatctccatggcaaccacattacatgtacagagaactgccaaaataagtcaagatccaagcaagtaggtgttggtggaaagagaagacaagcactcagcaatgggcaaaaaccacctagaggagatgaattatctttgtgaatttaactcttcttcccatttgtttttctaaccacacctaaagctctagtttgagtgagaatgtgtctaaagtgtcgaggctgccaaatccagatcattcaggaaggtctcaggatgacatgaatgaggcttaaaaagcccccgattgaagccaagagaaaaatcattaagtgaggtaaataatttccctgtagcaattaactcactttcccaagttttttcagcaacttgcacagaaggaatatacttttttattttccaggtggcttcaggaggggtaacaaagttgatgaaaacattattgggcaggtaaaatggaaactatgaagataggtaccaagttcatacgttagggagccaggctgtccattggtgaaatctatccctgtaacacagggagaatcctattaaaagtatagtcaagatgtccctagagaatataggtgctcagaatacatacagcaggtcctcaaatgacatatttttgttcaatttgtttccttacattgatgagaaaaaaatggatttctggctgggtggggcccctgtctgtgtggagtttgcacattttccccacatctgtgtgggttttctccagttactctggtttcctcccacatctcaaagctgtgcacgttaggtgaactgccgtgtctacatggtgccagcatgagcaagtatgggtgtgtgtgaatgtgccctgtgatgggatgccatcctgtcctaggtcagtgttcaccttgaccctcagctgttagggtagtctctggttacccgagaccctgaactcgaatagttgggtagtaatcattacttattttcattaatctttcttttctttttttttttttttttttttttttgaggcagagttttgctcttgttgcccaggctggagtgcaatggtgccatctcagctcactgcaacgtccacctcctgggttcaagtgattctcctgcctcagcctcccgagtagctgggattacaggcgcctgccaccacacccggctaattttgtatttttagtagagatggggttgctccatgttggtcaggctggtcccaaactcccaacctcaggtgatctgcctgcctaggcctcccagagtgctaggattacaggcgtgagccactgcacccagcctctaatctttcttaagtatacatatagctcacatttatcttaatgtttaatattagaagtgtgttaggtctttatttagaagtttgatgatgtttttgtgaccagagagatactataggaacttaagtctttataccaattagctgatggtcaaattggtttcattctacatcatttcgcttaaggttgcagtttccaagaccctatcgatgaagttaagtgaagacttattgcatgtttcttgggacatttaaaattacccagcaaatataaagtaaatacacatttatatattttatatttaaatatcaaaatatgtatatatgtgaaggaaaaactataaagcatggcatataccttatagcccttcctctacacctttaggtcatcacatataagaaccgcaagctctccagtatttttatgccttccagcagcactcgtggagagcccatgataacatgcaacccagggctgcttctcacaggtttacatccagaggctgagctgggtccctgacattggcctggagagcctgttaaaaatatggattcctgggccacacttgaaagacagggattcaatatccctgcttcatagtatgcattttaaatctccctgggtggttgtcttgtgtagacaggcatggaaaccatcagaggaagcatacatccctccttccccttctccggtgactcccctactctctgccttgccaagcagtggtgaggaaccttttccttgcctctggaacagcagcatcacacctgttagagagctgctcccagggcacttatgagaccagaaaagtgtccttctgcactgaaaaatgagttagaccagttctggtcaccaactactaccatctagaggagtctgctctcagatgcactctcctataaattctgggtggaagggatagaggggaactaggaagaaagagaacctaggttccaccagaggaccgagtcagcaagggagagtaattaggtcttaaggtgcaataaacagccaaattttgaatgagaaataagcacactcttttttctcctgtccatgcacagaagtacttccctacatcatagccttgccagaaaaattaaagataagtcaaaagagcccttgaacatcacacagctcaacactcagctctcgtactgtttgagaacaccatcattttctggtttagatttatacaactgtatatttggagaagctcttccaaaacaaaataattgtataaaaaatgaaattaaccaggtgaggcatctgacaaaggcagtgtcaagtttatgcagcaaatgctcattgaaccctatgatgtgtcaggcactgtgaacatggggataagtaagaaaagtcatcattcttctcaagcactgattgtgttacaggtgtcttatgtatgttacctaatataatcccatgttacagatgaggaaactaaggatcagaaggtgactcattttgttgaagtcagacagctagtaagtgacagactggaattaaaattgaggtttaccccaaaattatacttcattaagtccactacagtagctccttcccagtctattgtgcaagaaaatgtcatatatatatatatatatatatatatatatatatatatatatatataaattaattaatattggtcaccacatatccactcttctcctctattttaatcctcaaacaggcaccaaggatacatggaaatatgatgagacaaaaaaagaatgtgtcttctgagaagagatgagacactactcacattactttttccaggactggggaaagtgaagaaaagtctctgtgaatgaagtaaaggattacaaagttttttatggccttcatttgccttttctttcattcttccctcttcataagacttgaggctatgtgtgctcctactttagaagtgacagactctgaagaattaagaggatttaaagtggtgtcaatgacaaggaacaaggagtttgctgttctatggaaagctgcaaagggatctctaagctttctacattgtcccactcaattcaccaaagagagaaaactgatgtgaaagaagtctttgtcaagaaaataaaggaatttgtattttggggtgtatcctaaccatcatatagaaaacagacaggataggaaaccagtgcataaagcctacatctttcgctcacctatccccttccttcccttctaccttgccaaacactggcctgccactgtcatatctctcaggtgtatgacctagcaataactgagtcaaggcagcaaagctgaggagaggaaaaccccatgaaaacaatggtttaaagactatgcttgttttatagagaagtaagaacataagaagctggtggggagcaagcttcaggcttcaccaggggagttattttagctgggtctgaaagagcgagtagtctacttggcaaagaagagaagaatggagagtccagagagtgtgtcaggtacaaagaagagtatgggaatgatgaaggtatagctgcaggacaggagggaggaaagagaataacggagtcagggtgggcagaagcaatggaagaaataaggctgaaaacagggccaattgtgaagcttttgaacaggatgctgtattcctataaataagtacccaagaacagttttcaaacagggcagataagtgatccaattaatttttctaattaatttttttcattgttgttaagaaaaatagtggttggcataaagacaagttaagcggctcatagtgtagataagggaaacaatgcaaacctgaaccccagtagcggaaatgatgattgcatgctggagaataatctgagactattgtgaagagtggatggatgtgacatgtgaaatgtagtggatttaaatgcatcaattgctccctgtgactgcagggagaataagtatagctctgacctctgcaggacactatcaaggtatgacaccttgtatttatgatctttcttactataactacaacctccttaggacttcaaggtcaaaggtgagctgactggttcttattaaaattggcaaaggaagaagaaatgcttgggagtcaagaaggaaaggaagcctggagcattaatgaagaccaagaaggggtgcagcataatcatgttgcacattggaagactgagctagtatgagtatacagaatgatgtgagggaaacagcatcccacaagtaaacttttatatatgtaacaaaaggtgtgtaactaccttgggagccctcctatcttcagacatgagaatactagcttggagttctttaactatcttcattgttcttgttcagccttctcaaaatcaccaacatctcttttgcatggtgggatataagatgattgcttcagtaattattccaaagtccacaccctgatgtcctctcaaatctcagagatgtcagtgcatatcatttgaaaaagttgccccaggaataaaaaagttgctagaatctacctgcaccatgcagtctcaccgccactaaaaacttctactccaatatgtgccagacctatgctgaatgagaagaaagattgcacaccaatttgatacttcaatgaactcatatggacttgggctccctctcattacggcatcatattacaggaacatgtttaagtcatggctcactgtgattctcagctgtatgttgccatcctctttcatcctgttttcctgtaagtgagctcttcattatcagtactaatggaggacagggagggcatacctaaccaaaatcaacagataactccaaaacttattgtaggcaaagggttcaaaattctcccccaccaagccctttgcagagctcctaccatgaagcagaacttaataatgctttagccgttctttatgcttctccatatcagctggtggaagtcctaacaagcagcaaaatgaccaaaacccagcaggaggggaaagggtgaaaagcaaaagacctagaaactgcacaaagtgggtaataagtgcctgaatgatgagctcttggaaaatcaggccctgcttgatgaggtttattcccccacccccaaaatgcaatgaagacaaatcacccagcaagtttgctctaagatgtaaattctgagttgccatgaattactcccacaactcaggagagaggcaaagaatgggaaaagcctcaattttcactttttaaatgtgcaaccataaccttaaaattcatccaattcaggaagcagcttgtctctaaatgtgattagaaaaaaaaacagaacagtctattgagtctatcagggcttctgacacactcacagatggtgcaactaacatctagctgagtccgtatccctaccccatttctcccttgtcaccctactagcttttgggaacacctgactttatctccccttgtattcttatcccctgttctctcttatgtaggtgctacagtcactagaaggagacttcttatttgacagtgacattccaaaagcaggaactagagtgcgggggctggaaggagcctcagcaaagaggctctactccatgttcctcatcccaaacattttgtccaaggttgcacttagggacaatatccctaccaatgaaatagagccttttaaagagatcagaagcaatataacctcatccattaaatctgtgcgtgaaaacatggtatccaagttagcattttctgtacttttgtgtgcatttcaagaatttcacattaaaaatgtttcactgtataaaacacacacacacaaaaacagttaacctgcaccaacactactgtttcactacttaagcagagaatgttgatcctgagagtgcattttgctcaatccaacatgtgacactgcaacttgcaccaaagtcacagataagatcacttttgcatctgacatgtagaatgataaatagaccccacctgctcttctccattgggtagcatttcttaaatgagaagctgggacattattcagatgcaactaccattgcacagaacagcactatttcttccagcttcggcattcagctggaggtcacctccccacatcattatcaggccgtgctccaaggttgatgaggcaatgagtggataacacacactgctgagggatgcgcgtgcatgctgttctatactgatgcaataccatgcggtggagttggggcgcggggcgcggggagcggaatgattttacatttaggaacgtctccaaatcccagcaaatccctgccttgttgaaacaatgaaaccctccacaaggagagcccctatagaaaagcaagacagtagggaatttctcaaaatgttccttttgtggagacaagtaaatattagttgaagttgctttgatagtataatttcaattttgtatacgataaaatgacttgtgtctgaataaacaaaatatatttataacagattttgaaaagcctggcagaaaatattcaaaaaatataacagtattacatctttgtgtgtgataaaaatcagtgtattatataattgtttcaaatatttccacaatgtgtatacatatattacttttatgtacagaaaaaatatattttaaaaaccaaagaagatctactttgatcatccgcatacagtactacataacaaatcaaaattatttttatttttttgagacagagtttctctctgtcacccatgctgcagtgcagtggcacgatcctggctcactgcaacctctgcctcctgggttcaagtaactatcctgcctcaggctcctgagcagctgggactacaggcgcgcaccaccatgccaggctaacttttctatttttagtagagatggggtttcaccatgttgctcaggctggtctcgaactcctgacctcaggtgatccacctgcctcagcctcccaaagtgctggcattacaggcgtgagccaccgcacccggccaaatcaaaattattattataacatgtagaaacttgggaaggtgaccatccattgaaacattgtctaaaaaagcagaataaaaattaggcacatgctatgatgacaactatataaaagtaagcatgcataaggttaaaggctacagtaaattaaaatacttatgttaggatggtgggaatatcagtgaactttcttctgttctgattttcgtattgctgctgtgtacgtattatatgccttgggaaagttggcttctctgaggtcccatctccccaatacctgcagtgcattgttgtgctacaaagtaggacatatacactttctggaactaatagataactaataaatggtgaccactagggtctcctaaatggaagtacagtaagcaagcttggaacttttatcaaggtattacaaatagtataagaaatctgcaaaagaatcacaagaattaacatgtatcacttgtttaacagggatctctgaaaaaagatagggttggcaaaggaaacttgtctgttgaaaacctacaaaagaagaattaatgtataaaaaagtgacttttctagcaccttggagaggagaaacctacctgaaaggaaaaaaaataattttttttttttttagatggagtcttgctctgttgccaggccggagtgaagtagcattatctcagctcactgcaacctccgcctcctgggttcaagtgatttcttctgcttcagcctcccaagtagctgggactacaggtgtctgccaccacacccagctaatttttgtatttttagtagagatggggtttcaccatattggccaggctggtcttgaactcctgaccttgtgatccgcccacctcagcctcccgaagtgctgggattacaggcatgagccaccgcacccagccttttttttttttttcttgtctaaataaatacctttggcagataacaatctagttgagatggaaagattataacttcagtgacaccagaccctcagaccacgtaattcactcctttttctctttctaaacttaccagggaatctttttattgtaactgggcagaggcagctccagaatttcaacaaaagaggactgaagggcagtaatacgctgtctgtctgtggggaggtgggatgggagatgtcagtaccctgggacttttcttgagacatcatctgcacagtaagtacactggttttattctcattgtattcctattttccaggatttgaaagagaaactgatggcaattttaaggaggtcaaataccatccccctcctcttggcctatgtaatttcgctaactgtggaatttttctactacaatgagaacataacgaaaaaccaacttgaggtgattgacaaatctttttaatagatatttttcagtgaatgtttggagttcattaaaaatgactgcaatttctctatcactttctccatcaagaggtagtctacttctatcttcccccatacccccactacccttaactctggattgggctgtaactgctttgaccaagagaatacagcagaagtgatacttgccaggcagcactagtcacaatgtttgaggaaccccgagtggccaagtggaaaggcccacatggaagagaattgagtcctggtgactcccaggtgacagctagtaccagtctaccaggcatatgagtaccccaccttgggagtggatcctccagccctcgtcaaacactctaactaatgccacttggagctaaaataagctgtccctgttgggtccttcctaaactgtgaaattgttagcagataaataagtgttgttaacttaacacaataagtttggaggtgatttgctatggaaaaatccacaatggaaactgtgtaactaaatgataactggtttacatttcagtctttgatgagtttggtgaggtgtattaatctgttttcatactgctataaagaacttcccaagactgggtaatttttaaagaaaaagatttaattgactcacaattcagcaaggctggggaggtctcaggaaacttacaaccgtggcagaaggtgaaggggaaacgaggcacctacttcacaaggcagcaggaagaagaagtgcacacaggaagaactaacacacacttataaaacgtcggatctcaagagaactcactcactatcacaagaacagcatcgagggaaccaccccagtgattcagttacctccacctggcctctcccttgacacatgaggattatgaggattatggggattacaattcaaggtgagatttgggtggggacacaaagcctaaccatatcaggttggttattgccttgattctgaccaactctaagaaacttatgaaattgagattggaagactaaaaattcatggggtgtcataatcctgtcaaagcaatactttttgtttgacttctgcctaaagtaccacattggtctccctctgtaacatattcaaaaaattcatttaactaatacttaccaagcaactattatgtgtgaagcactagggattcagtggcacaaaaaaaaaaaaaaaagaaaaaaaaacagacagttcctgccaccacagtgttcttggtctagtagatgtctaatttcatccctccaactacaacaagcagtgcctgctctaactgaattaactacaactgcaccatccaggcaagatcacaatggaaggttttgttttgatgatgaagactggatgactagcacaagaagcccaggactatgcattacaatgtgtgttaaactgctgtcagttcagtttggcttgcttcaagcatagcactcaaagatccagacaagaactccaccaatcctcctgaacacagccttacttcagtgttctttggataaaagacaaacacaaagcaaagcagaggttcagaagagctgtgagaagaatccttgaaggcctgttgaaaaattcatatgcaactcctctaccaagtaagttgagtctttgctacacaaatcagtatttgtcaattcaaactccaagaagtcttttctttctacatttgaataatctcagcaataacagaacttcagcaatttgccgacaaataatcacattaattaagatttgtataagtgttttataatttatggatctctttcatgtacgtaattgttcttccattatcattctcagaaagtatttcccataggaccttagcttgattccttccaagctactaccatcacatccagagtaacagaattataattgtgaaaatattcataagtttactgattaaaaatatgttcaccaggatctttcccttaaagagggaatctcaaggtatttaatttttatttgataactttatgtgctacctagatccaaggaggacttcataacagaacatagcagtcagagcatgtacatggcatctgtttgctcagagattgattggttttctggtctggccttattatgctcttgacttcagtagactagggaatgtctctgtatcagtgataaatgaaaagatctaggattgaaactgtgataagcggctatcaactaaaccaggaagcacagctgttaaataagcattacgatttgaacacaagaatagattccattaatccgccctccggggggtccatacacaattagtgaaagtctatccatccctgagagccagctccattataaccagggattcaactcacttccaaataccccataaagacggaccccacaagagttaaagagtggctttccagggctctcatgcaaacaggagaccccaggccagcattaaaaattttaagttatcatttgctctcccttcctgtcataccacatgtttatgtgcttgtcaaactcccattccttacagctaaagtctcagtcagactaggaagaaataaatctatgcattccaaattaactcattgcttacaagtttgtatagaaagggcactgcacaaacttagaagagggtcatcataacatgaacatcggtcatagcatttttatgatgtcaatttcccagcacatggcaggaaagtgtttggaggaatggacacgttaaaaaatttgtgcaaaggtgccatgtgggttaaactgttttgtgaatcaccactacatttttatgctcccagggatacttgtttattacctcaaataaatttctaattggggagggtttttagaaaaagattgtatgcaagggttgggcttttctttaagtgatttcactcccatatggccagctagagaaggagggaaagaaaagataacaggcctttaaacccctcccttatttgggcataatgagagacctcttgctgatgcccactcttcatatttgtgttattcctgaaatactattgtcagctcacaactttatattttttatcactcacatgctatatgttcattagagcaaatgaaaaaatgcagttaagaaaaataataataatttcactttgtagagacaacccacattattattttagcaactttcccagatgaaaacatctaggcatcaatatgcaaatacaacagaaatatatatcaattatacataactgctgtaatgttttattttcattcaatactttaatctctctctctacacatacacacacaaatatgcaatatatttttaaaaattcataatctttcattgaattattaaccaaaatttaatcaaccccctcttcatgaaaatttaggatgttttcaattcacaaaaactggataaccaccctcataggcatatctttgtgcaataaaccttttccttattttaagtaaggttgaccaccatgggatccttttaacttcaatccatttattcccaactgcctcttcccacttgggaaacataaaaatacatacagcaaatgtaatctcacatagtcactttcactcacaatgacatgcagattcaaactcaactcatacagaaatatacccagtatacagattcctcatacattcacttgtctctgtcatcaaaagagaggaagaggctaggataaggctatggctgcaagaagatagggacaggatagcagaggagttctgaagattggggagaaatgaaaattagtcagagatttatcagagagataagaaaatagtaatgtggtcatgaggctggcatctccagttatgagaagaaggtatcaaagtcatcaattaggaaaagtctgatgctgagaccgggaggctgacagtgacatggatgctcaagggtaggatgcatgaggaggacttagccagatgggggctacaccaccaccatgcagagccaatgccagggcttgcgggaaaactctcaatgagaaagggaaaggatggaggagaagggcatgggctgatgaaaggaagaaggatttgatccctgtgaaacacactgcttgaatggccaatccttgaacatgcattttacccagtatcttttaacgactcaaaccaaatcctgacacaccaacagatttctctaactctgcattcatctattttcagaatatgctgaaataacacccacagcattacagttcttcttggtcatcacaccatcccccagtgccatcccaatctctaggagacacccacatacccacctaatctagtgccccccaaatcctattggcaccatctccaagtgaactccttccttgccagttagacccagcaccccatgtaattccatgagatttcttctccccatggctgcatctatgttaaatgagataaaacagcatctgcctcacagcattgttgtgagagctaaacgaattaatacaggtaaaaggacttctaagtcctttgcctgaggcattgtcaaagctcaaaaatgttaaccattattataatgatttctcatttgtaaataaaacacatgtcactgatacttttattcctcattttttactgagccctaatttggaggaatcggtttctttctgcctaaaatattaatgccccatgactgatttcagtggaatatcttcacaaccaatacatccttaggcagccccttctccaattcccaggtacctttgtgtcatcatataagcatacctggatttgacaatcctatccattcttttttccttccccctgataatgatttgctgtgcatactcattttcatatatccaccatccctagcaggtgctttacacataggaggtatttaacaaaagttgaatttgattcccctgctctcttgccttagcttttccctattacccattatctccctaacttctccataaaccacaaagccattttatgaggaaataaatgccatatgatctcacagttacttgtagtaatcatcatgtctattatttcaaattctctggacaaggcactctaagagacactagaggaaataatcccagatgatcagattagaaaggcatggatgatataaggcatagtgtcttgtattatctagatttataatttaaaagtatactatattttgaactttcatggcaggaggcacacaaatatacgttcataaggattcccaaaatgtgtttgtataccacaaagggattatgtctgttaacacattaatgaacaacaaaaaatgcactgtatcacccatggccctgtctaatgacctggctgtaacaccagtcatttttgttttcaccaaaaatagtccacaagcttccccacattgaaagtcattgatgagatctccaaagcagttactttgaatttagtctaaatttctctttactataataattatttttaaataatgtagagatactcaagagttcagagaactttaatcaagatggctaaagacattaaaataaaccctttgatgaacagtgcaagaaactgcaattgtttagtctagacagcaggcgcagaaaggtgacgagagtttggcttcacattaatgaagggttgttattagtgaggtagtaatcatttgctatccatgcccacagtagacaacacaggagcaaacaaattaaattacatcaggaaagatttcaattagacataaggaagaacctcccggctgattaattagtagaataaagtccttgagagagactgtcatcctcatctctggagtgcttcaaggaggcagtaaacaattctctaccttggcaggctttggtaatcatctagctatgccaccaagacctctagaggtcccctccacctatttgatttgatgagtctcttacagtgcttattggtatctcatgggtcacagaaatacactggaactggcaaaacactgaggctcaataaggctggaaaacagcagggattagtgggagaattaaggactgaatagacataagaaatgccattcttcaatatgatcatattctaactctgttaagatcgaaagaaaaatgcataaactcatactttcccagtgggagactaaatggttagaaataaaataaagtatcttccagcaacctaaggagaactcaatcagcagagaaaataaaaaggtcaaagtagactcactatttaatcatattttccaggacaccgacatgcctcccatagatctaaagccccagctttatgccatgttgctgtatggacagcagtagtccccaaattaatctcacacatttcctcctgtagcctgaacatggaattcccaacctccccatgtctgaccatcaaagcgttaaccaccttgaaagcccaagctcagatgccacctgccctaggaagattttttgaatctcctaaactggaatgtcagaactgtgtgagtcctgtttgcctcagctccacacagctacagggacaaaacactcacaaagtaaatcggagcaggagacattttggcctgccttgttccaaggcatcttcccaggcccagagagcttccatggttctcttctttccctttgatgcaggctttcagacacagtctccttcctcctcctctcaggaacagccaccccatctattatcccttgtaaaaatctctttgcccaagcttggctatagagaggcaatgaggttttccaacccgtcacttctcgctgctcatgagggtcagcatgtaaactcttttctgtttaaaggtcttattcttaatctatgagcatgaatggtaaaaaacacaagatcgtaattaaagtgaaaatctcactttgcttttattcctgaatcaagagcctaccaaatgtcaattctgtcagctcttactccattaatgaaggccttgtagtctctctttcactccagcaattcattcaagggagaacaacagatctacaccagcatcaggttgcatctcagaagatctcacaggggaaaacgcccaaacaagtaggtctcctgcaactctttaacggatattttatgaaagatggcctgtgactcaggagaagaagcctctgattccctttcagtgatattaatcactatatcttcttcctgaactcaatagctaaatgccaaagaattataaacagaggtagatactcatagagatgcccatttgctatacgtttatgtagtttccaaaagattaacattattttcttggggtctttggaatgttgtggttatctaaagaaaagttaaacagtgttatatcaataaacaactaaatcagggaaatcaatgcattttttgaacacttatcagatctcttgcaccagtgaacagcagttataaaatctgagattttcacttagcacctattcggtacagggcttgagataggtggagaatgtgcagatatacaaaacacggctgctttgtggacagtaaaattgaaaaaaaaatttaacttaaatttttgtaaatcctattggaatatttctattcaatgcctgaaaagaaggaatgaaagcaacaaatctctttgagaatttgtaacacgtaaaatatacagcaagtttactgggcaatcatggtgagagagacaggcacaggctcctaggtctcccacagagctcttgtagagagctgatctgctggacccaagctgaaggtctaagcaaggctagaagcctgatacatgtagagtttgttcaaggaacaggggagttacaggcaataaggcagagtgggctgtgactcagcaggtacagacttgtgttgaacttagtccagctatcccagaccaaaaggtgaacagcagcaaaactaataaaggttgtgaatttaccacttcccaatagaagtagttttggaaatgagctggcaattataagattctctttgaggctgggtaatgaggagaggctatgtcctctccttcccccacgcttcccgtaagttttattctgtcacacttaaaacaactttgtgggagtaggcattgttatttccattttacagagagaattgagttcgacctgagagattaagaaaagtcaccagtgaggccactctaacgtcaaagcctatgtatgaactccctttttccatacgaagatcatttttcttaatagagaagatgtaattaaaatagaggtggactatttctgatttcatttatcatctgtttacataagaccaactgccccatgaaataagtctatcctttggttattcttgctccacattttaaaagttatctttattattttggcatttgaagaggagaggagacattgaatttgtggggttttttgagcacttatttatgctaaatactttacatatatcatttctttctataaaatatcattttcctattacatacaagaaaaaaactggtacatacacagagaggttaatcaacttatccaaggtgacaggtatcggtaattctaactatcttcttgcagtactgttcagtgtacactagtgttttctttgtttattagctttttcattcattcgaaaatatttattgagtgcttccaatatttatttagttccagactctgttcccagtacctgggatacatagaacaaagatccttgcccttgtaaagcttaaattctaatggtggtaatagataataaatgagaaacccaggtttacataaataaagaagtgatttttctttcatcttgtgaagtatgtcttcaaaatccaaacttactggttctggttccagataagatggagtgaacacatgccaatttttttctcctacttaacacaactatgaaaccttgataaaattcatggcacacctatctgaggtctctgagaataaaatatcaacaggcagattgagaagaacaccagaattcaaagtgtcaccaaactgagtggctttaaataaggctcagaaactcataacataatatttaaaatatccaaaatacaatccaaaattactcagcatacaaagaaccataacatgtcggcttgtacaagaaaaaaacaattgacaggcccccaacattgtgatgacacaaatgttcaaattatctgaccaagattttaaagcagctattataaaaatactcaaacaagcaatcatgaacatgctttcaacaagttaaaatcgaaagcgtcagcaaagacacagaagatagaaagaagaaccaaacagaaattttagaaatgaaacaatataatggttaatataaaaaatacttgctggatggaactcagtgaccaaaatgttagtaatagaggaaagagtcagttaacttacaggtaacaagtatagctgagcagtaccttctccttgaggctctaagtactgcaccagatccacgggtcactacctctgagcttctaaattctaataaccacaaccccagctctaaaacgaagtcccggcaggtattatttctcagcattcccttttcattcttccagctgtctgatttcctatattacattcccactgttgacaaacattcatatatttctggtgagaaagtaaaatgatactaccgctctgaaaaatggttggccatatctgataaggttaaacatgtacctatcctataaccaattattcagctcctgggtatatacccaagagaaataaaaacatatgtccacaaaagcatataaacaaaaatgttcagagcatttttattcacaacagccaaaaactagaaacagcccaaatgttcatcaacagaaaacaataaattctgttatattcataaaatggtatattactcagctttaaaaaggagcatactgttgataaatgcaacaacatgagtgaatctcaaaacattatattgagcaaaggaagccagacatacagtaagatatattttatgactgaatttatatgaagttctaggtattgatgggatgtatctcaaaataataagagctatctatgacaaacccacagccaatatcttactgaatgggcaaaaactggaagcattccctttgaaaactggtacaagacagggataccctctctcaccgctcctattcaacatagtgttggaagttctggccagggcaattaggcaggagaaggaaataaagggtattcaattaggaaaagaggaagtcaaattgtccctgtttgcagatgacacgattgtatgtctagaaaaccccatcgtctcagcccaaaatctcctgaagctgataggcaacttcagcaaagtctcaggatacaaaatcaatgtgcaaaaatcacaagcattcttacacaccaataacagacaaacagacagccaaatcatgagtgaactcccatttgcaattgcttcaaagagaataaaatacctaggaatccaacttacaagggacgtgaaggacctcttcaagaactacaaaccactgctcaatgaaataaaagaggatacaaacaaatggaagaacattccatgctcatgggtaggaagaatcaatactgtgaaaatggccatattgcccaaggtaatttatagattcaatgccatccccatcaagctaccaatgactttcttcacagaattggaaaaaaactactttaaagttcatatgcaaccaaaaaagagccctcattgccaagtcaatcctaagccaaaagaacaaagctggaggcatcatgctacctgacttcaaactatactacaaggccacagtaaccaaaacagcatggtactggtaccaaaacagagatatagaccaatggaacagaacagagccctcagaaatagggctacatatctacaaccatctgatctttgacaaacctgacaaaaacaagaaatggagaaacgattccctatttaataaatggtgctgggaaaactggctagccatatgtagaaagctgaaactggatcccttccttataccttatacaaaaattaattcaagatggattaaagacttacatgttagacctaaaaccataaaaaccctagaagaaaacctaggcaataccattcaggacataggcatgggcaagtacttcatgtctaaaacaccaaaagcaatggcaacaaaagccaaaattgagcaatgggatctaatcaaactaaagagcttctgcacagcaaaagaaactaccatcagagtgaacaggcaacctacagaatgggagaaaatttttgcaatctactcatctgacaaagggctaatatccagaatctacaatgaactccaacaaatttataagaaaaaaacaaacaaccccatcaaaaagtgggcaaaggatatgaacagacacttctcaaaagaagacatttatgcagccaaaagacacatgaaaaaatgctcatcatcactggccatcagagaaatgcaaatcaaaaccacaatgagataccatctcacaccagttagaatggcaatcattaaaaagtcaggaaacgacaggtgctggagaggatgtggaaaattggaacacttttacactgttggtggaactgtaaactagttcaaccattgtggaagtcagtgtggcgattcctcagggatctagaactagaaataccatttgacccagcaatcccattactgggtatatacccaaaagattataaatcatgctgctataaagacacatgcacatgtatgtttactgcggcactattcacaatagcaaagacttggaaccaacccaaatgtccaacagtgatagactggattaagaaaatggggcacatatataccatggcatactatgcagccataaaaaatgatgagttcatgtcctttgtagggacatggatgaagccagaaaccatcattctcagcaaactatcacaaggacggaaaaaccaaacaccacatattctcactcataggtgggaattgaacaatgagaacacatggacacaggaaggggaacatcaaacaccggggcctgttgtagggtggggggaagggggagggatagcattaggagatatacctaatgttaaatgatgagttaatgagtgcggcacaccaacatggcacatgtatacatatgtaacaaacctgcacgttgtgcacatgtaccctaaaacttaaagtataataaaaaacaaataaaaataaaataaaatatattattaatgaaagaaaaaagcaaaattaatctatggtgaaataaatcaaaacagtggtcgcctttgtgtatagatgtgtattgggagtggggagaggacaagtattgactgggaaggggcatgagacacaactagtgataaaaatgttccatatactgatagaggtgtgggttacacccatgaaggcatttgtgaaagctcactgaataggcacctaagataaatgttgaaacacctagtgtgctttgtttccattagaattttatctttggagaatattataaagtctctgactatcagggaaagccaatcttttctatcaacttttgaaatacattgctataaagtatagggcgtatgttttctaatttcaaaattttaaaccctaagttaatatggtcaatatctctctcccaagtttctaggtacccccacatcttcaaacagttcttggagatagcttctcttggtgttaatttatattcagaatatgtgacagtgaaaatgtttcttgatctcaatttagttcacttcaataaatattaccgagcataactatatacaacgcaaggtgctaagtgatgcaagaaatccaagatagatagcatttagtccctccttcaatatgcttaccaccaagcataagatgagataccaaagaattaaaatataggcaggatagaagtaattttaaagagtgtaatacacaatcaacaagacatgaaacatttacagtacatttaagaaacgttaggtatttcttttaacatccttggttgaaaccattttaagttaacaacatgacttttttcccctactcttggtccacttgatgctctccttttatgctcctagcagacataattagcagacactgatgatgtcattccaccaaatctccattcctattagccctaataattttagcaagtgatcatgaaagaacactgaccttagtggcttaagcctcccatattcaagaggtccccatcttacgaagacaggcagtatgactccctctaaagaggcaccaacttcttttcaaatgaatcacagaatctaattattctgaaaattatttaagcagaaatcagtacctatattcatcccataaaagagcagccatgaaatacttccctagcgatgagccatcagtgttggtaagacgttcttaatagaacaagaagtcacatgaaccaatacgtcattccacatgtgaacaaaaattctacaagggaacaactcagaatctggttgttatttttgcctgttttttttcttgctatcagggtcactaatgcttaagaaaagtacgtagagagtggggcaaaagttgagacaataaagcttgcatatttagaaatctgtgtctacaagatgtttccttcttctgaacaaaagcttgccattattaccaaccacttagagcttttagtctgcctggctggagaacaatgcagagtgtttaagatgctctgttaccagtgttttgtaaagatttttttttcttactcctaaggactttgctcctttgtgaccttaagggtgtgtaattttcagtttctgtttagcatagacaagatgagtattgtttctagccctgtattctaaaagcaaaatccctaaaactccaattcagaaattaaatagatttctaaaaatgtaccctacatcactcaaccaaagtctgtctctcaggaagtgggagggcataagattctctccttcctgtcctccctcccccacccaccactcctgatggattggagatgtcagcttgtcaagtcttattgggtgctacctgatgtaagtccacactgaggcagtaaaaatctgtttgcagtcagctcttttaataagtctcagcaaacaggagcaaagcagatctattcagtaagatacttcctctgatacagcggggaaaaaatagtccatgacagaggcttgatatggaggagacttttagacaaagaacagttctttctttagcaaagctggagagaaatagtttccctagggatttgaggattctaagaaatactgtatttttatgcttatgattcaaacctgacccagactccaaactttttaaaaaggaggtcatatctcccctgtaaaatgcccccatcccacagagtcttgctgagtcctaagcattttgtgggttcagaactctgataaattatattgatgctgcctcttaatcttaagcccaaagggggaacgctggttggttacccagccttccacctatgccaaaaagaataagaaagcctgagaaggtcaaatgttctgagaatatattttataatacaaatcacctaatttttttattattgtttgtgcaagtttaaggggtacatatgcagttttgatacatgcacagattgtgtagtggtcaagttagggcttttagggtatctatcgcctgaataacatatgttgtctccattaactcttttctcgtcatataccaaagtaaagagtttctcaagaaatttcaaaactctgggaaatatgtgtttatgtactatcacttcattattcagataaaattaggtgccaaccacctgaagagagtgggccaatcttttcagtaaaagattgcttctcgtagttcttagcgcattgctggagtattatgggtcttaacggtgctaaacgttgatggatggtggtggtggtgatagttatgacgatgatgtatgaaataatgaagaagacaatgatgttcgctaacaagatgaagccaaatttaaaaatgacctgacagggtgaattattctgggaataattattatgtatgtattccttcattcacttttctgaagcctctccgttatcatcacccatatcatattcacttctcctagaatagtgcagacatggcagaaagtgaattccaggagtctggctagtaacattcaaattaaacttattgcaccattaggctgagaaatgtttttctttctggcaagaataaaatgataactataaaagttcttaacaatataaggtttttcaggaatagtcttgctctgaaggtaaaaagttgtctctgttcctaactcttaggaaaagtaacatgcagtaaacacttagtaacattttgaatgaatgcatgcatgattggataaataaatggataaatatacaaaagagtgggtaagtgaataaatggctcattgaactatatctctctactttttagaatagttactgattgtgcaggtaaaaatcacatcgtaagaaatctggggcttatcctctgaaagaatgatctcagagaacctaaactctgatctttcaaatgagtattttaagattactgtacatgtgcttcagaagcttactgcaaaatataaccccttgataataaaacaaaataaactagtcatgatgatgtcataagagcaagtccttttctaggtcattataatttttcatgtcaatttccacagaattttaaccagaagatctgtagaagcagtagaattttatctctatgggatgtggtgatggaggtatgtttcttccagcatttgcttacaactcccataatatctatttacaaatcattatcctgtccttcatgatctaagtccaaaaatcactgagctaacagccacacaatcctttctgcaggattttttaaaagcctacaaagaaagtctcaatggatagttggtgacctaaacatcaccaggttgaaaactccttggggataagaatatccccaatttataatacctctgtatctacaacaaacttaatagtaagttctgcataaaacagcctcttaataaatgtccattgattaaatgcagaaatgggactagggtgatgcaataggaaataaatactgtgcaaatttagagacaggagagtatagtgtagggaggtgaagtcagaacagacttcacggaggatgacagacttaaataatatattgaaataaatggctgtgctatgagccagtagtaatctaagcatctaaaatgaaaaagcactaagctctaagggtgtggagctatctcacagtggcaccttatacagggtatttctgactttgaatatcttaccgttgagaagaaccctacctaaatgggccatgcatttcattgtcacagtggatgatggcaagtgaaatacgagattgatgtcgaatttttcaagaaagatggaagacagggatatggaatgaaggtgagaaagaaagaaggaaagaaatgctttcaatgaaagaaattcttctttcccacatttccagttgaaggattaatctgtcctctgagagttaatgtcatatgatgatctttaggaaaacacaaaatagagggcatttcgcactgccaaatgttcctatcattccattcctgtcgtgtccacatatagtagtgttagtttcataatctttggtctttgtgactgagaaagtccttctcattcacacctctgcctaaggtgactaccctgatgtgactaaatatgcaaggacttagttctttgacctaatgcaagaactatagaaaactactaaattttctgcaaacccagaaaataagaacggtcagttctcaacagaaggggaaatgagggaaaggttactagcatttcctatgtaataaatatgtttgcattgtatcatgccatacgcgtgtgtgtgtgtgtgtgtgtgtgtgtgtgtgtgtgtattcactcaatcattacagagacccttaaattttggagtttatatctcctttttacagttggtaaagctgaggtatggacagttttacacaagttaaatagctactaagtggttatgaatcccaggagacttgggattcataactaggtctggccgactctaaaatatactgcagctcagaaaacaggcaattctgggtaataaaaaaacaattctgatttaaaataaaagcaaggcaatgcagaataacaagaaaagatcattagaattaaatccagccccgcttggaatactatctctatcatcaacccttaaacaaattactttccattagccacagtttctcctctgttaaatggcctaagaactacccgacaacacagcagtatgaactagatatgataatctttgtgaatgtgcctaacccagtagcctatacaatagggctcctggcacagaatctgtaccgagtaggcattcagtaaatatttgttgaatgataatgcagtagacgcgcgagaacccacaagaactcacaaaatcataacagatggttgtcttatttttaaggattacctatcccttccccacccccagagatcacactacctataccttcactgtcataaagcaaaagtaaaaagatacaaaatactggaggtggaagtagaggcacagtctgggtgatccaaaacggaaaatggactcattcttttgccgcaaatcacagtatctttttctgtttgtctactgaggtggcttcccttatagccacccttagaacaagaaaaggaaaacaaatcccaaaagaaacatgggggcttaaggtcagacactgaggatgctccgtcaggcattttctcccattttctctttaatgtctttcctcttcgttctcctccatgacctcctttgtctcttggatctataatgatgattcattccctgcatctccttatggaaaggaagtctttgcctctcacagacatgattatgtttgacatggtgaccctagtctcctattctgagacatcctcccccagtgccacactcactcacttttctctaacctggagcatgctttggctgctgcagctcccatgtaattctccagaagaacatgtgagtttcagttccaagaacatctcagtggcctgcatgccacatacatgctgctcctcttcctccttttccctccttcaaggtgaggagacaaagcatctcagcctgatcagtcaagaaacttaaccaggagtatttaaggagagattcagagctgtgaaagtccacatatagtttcaagtgctgcggaggaagtaccaaggaaaaaaagagccaagacccggactggaccgaggcagttccaaagatgaaggggtggggtgaggagaagccggacttgttactggcttacacccaagtgtaaattgtgtgctttgccctacagcatttttatggcgttggaaagcttctctaggaaattcctatggaactggaggtgaaaaaaatgtaaataagagaaactataatgttgccttgcacagcagcttctaaagaggatctggaagccctctagacaatcacatgatatccctggtgggcaaactctgtcacctaaggttgaacttagtagagatgacaaagttaatgcaccacagggctatcactggttatgtgacttttgtgttttagtttaaaaggggatataatgactggctcccttcacgctgtaagtagaaacacagagaagatatgcatcaatgagcaacctctctccaactcaccacttgcacagggactaaagatgccctttgtagaccaacgcttcatgccaaaatataccaaagcactgacctacctactttgctaagagacacatgctaagtctcaaccactcacagcatgggtaagaggccatcatccacccacccacatgcctgttgtcacaagaattctccccaacagctcctcatacactgaaatctcactcagttaactcatcaccacgcactctcttccatttccaggggccaggggatgacctacacctggtatccaacagagtagactgccactcccgcaagctcaccaccactactttctctcctgcacagtgagccacttgctcctggaatcagtcccctctataaatatatgtacagtgcattcggtcactcattcttgttggctttttcccagttgaataaacacttaagtgtaaacctactccttaattcacttatccacattaaccagatttattaattagataaatcatcccttgtactctgttgtaaactctaaagtaggatcacttaaaaaaaaagtctaaagtctccaataaatttcaacaaacatttattgtggtatgaaactccaaacaagagaagtccatcttaacaaccaaaatggtggtaacactgattaccaccatgagaagctacatggtggtacctgaataggagaccatcacagtacaatgtgcagggattcttgtaaagccatgccaacatttctgttcactgaacatgaaacttgtgataagcccaaaatgtagatatcaaattcacatagctactttttgcatctttacattgagtctgtttcagaaaaccattcttatgctaacttgtccctttggaagtatagctgtcttaaggccacagggtcaggaggaaattctttcgttatttcggagaaatgaaaggcaatttttagggcaatcactctcgttacttggtgcttttgtccattaaaattctggagcctctgcttgcaaataccaaaactggtttatcacaacagtactgcatgattgtgaaaaacttccagtccagctaccttgtaagcctttaaacagacagaaggaacaactatcccaaaccatgggacctgtgcaaggctgggaaaggttggccccagggatggcatgatgcacttacagtgtgaggggagcatgatagaaacaaaacggcaaaccagagtctcagttccctgggctaatggagatgtagggaatgtcgagtcagcctggctttgtctaattaaaaaataagcttctcatgtggataatcccctggcttgtgtcacttcccaggtacctgtggcctggcatctgtcacagggtgtctggctcctcagttctggcatattcaaccaagcagtctttttcttacatccccaatacaaaatggcatgccctttctagcattgtgtcagactgtctacactggtgcacaggacttactatgatggaaagggggtagcattaatgtacttgagacataaaactggctagggtcaaacgtcatcttgaaggtttttaaggaaagcatttaattcagcggcagatttatgtctttgtgactgttcaccaacagtgcattaagctaagtttcaaaaagcaaagtctagtctgtcaaaaaacatgaactaaaagtcccttattggcttccttctaccagcagatttctaaagggctagaaaagtctagagtaagcctcaatcttatggcaatcctatcactgctcttgaaagtccctctattgccctctccatgtttggtaaagtactaaacaaacaccttatttataggaggggcttccagaacttctatatagaaagagcctgagtggaggtgtgaggcagaaacctgttttaaggggcaagactaaaggaaacatcttggagctgctcttgcagggtaagtacagtgtttactaatcagttcctttaacatatactgcctactatatactgggataagcactttagaaacttatatgaacaaattcgacacagatcttggactcatgatactcatgtctaaagggagagagagataataaactacaaccacaagactgaggcaataaaaatattaactaatggtagcagccatttagagaattaattagtaccgtacaatagatagtgaccaagaagctgcttggtattgggtaggcaggaaaggccattctgagcaaatagtagttaaactgagacctaaatggcaagagtgagctggcaatatgaaaaacatgccaaggagagagggaagcatgttcaagaatcctgaggcaggaagaagcttggcacatttgaagaaaaggaaagaagctgatggagtcagaagacagcagccaaggacaaaggggaatagaaaaagtaaggcagggaaggtgttggattttattctaagtgtgacaggaggccattgaaaaattttgatgtgatcatctgatttccttaaaaaaaaaaattattctggttgttgtgtggggagggcaactgggagactcttgcaggaatcctggaaaaggattagggtgattggcagaaaggagagcagatgagatgatgaaaagacaggctcaatagcatggacttatgtgttggatatcggtgtaagaaaaataagtaaggaaaacctgccttggtgaccttagttcaccatttactgagttggggaagactagaaaaggagcaatttgaaaaaggaaaaaagttaccattttcaccatgctaagttttaggtgcctcacagacaccgttcggaaatgtttagtaggtaactagagagtctagtctagagttctgaggaatggtccaagttgtagatgtgtacctgagagtcattacctataaaggatatgtaaaagccatagaccagatgaagtcatctaggaaagttatgtaaattcaacaaataaataaataaataaaggagctcaagcagagccctttgggccgcgaacatttagtggtgggtagaaaagaacagagatagcaaggaagattgaaaaactgtccaataagatgagagtaaaatcacaagagtgtagcttcgtgaatatcaagaaaatctttcagtaaggaatctgtcatttcatcgaatgctgcagaggggacaagatgatagtagactgactattggatttggtaacatagtgaccactggtgactttggcaagagccacaagaaccattccattaacacagtatgaatggacatctgaaagaaatgggttaaggagggtgaaagaggtgaggaagtagagaaagcagctatagacaactctttcaagatgttttgctattaagaggaacagaaaaacaaggaaataggcaaaagcagacgtgtggtcaaggatttcaggggttttttaatatatagaatgtactagaacttacttgtgggtacttgaaataatatagtggagaaggagaaatagcaaagtccttgaaaaggaaaaagcctgagatccaaaatttaagagttcaaaaaagcgaaattcaagatcttttgctttctcaaggactttgctatttgtaagaattggtctctagtagaagcagggattcttcatccacagtagccagagtgtagacagagggcatgggtaccgatgcaggtaagctggtaactttggtagtataaaaatgagaaagttcctggcagaataactcaattttctcaatgaattatgaggcagacttagcagcaaagagtgctacttatagaaaagaggatatgtaataggctcagagtgacaagagagagtgcgaagttattttgaagtgggagaaagttaacatagtaaggaatgtagctggagtgctgggctgactcgagtgacgatttgagatccgtggcttcatcatcatggttgtgtttttccagttcagaaaagaaactggagttgcttgattgcttccagacaagcaagaaatgagcagtttgtttaactgaggctattcatcaggcaccactgtgcaccacttcaaatcgtctcaccacacctgctcttccagggatggatttggtgatcacttctgctctggcttcagccaacttcacggagcacctcatctgtagctactgtccagctatagcttcttgccctggggtttctccttcactcgtgtccaggaagcaggacactagtgaaggaactgctggagacgtgcatatatgcaacccggagatacagcagactgaaagggagcctctgaataaatgcttacaccttttttttttgttttttattattatactttaagttctgggatacatgtacagaatgtgcaggtttgttacataggtatacacgtgccatggtggtttgctgcacccatcaacccatcatctacattaggtatttctcctaatgctatccctcccctagccccccaccttttgttttttagtatacagttctaagacacatttcttaaggcttcttagagcatttcttgtaggatgaatgaccacttgctgtcagcaatgctcaaccagataatgtacccttgtatcaattttctctccttccctgtctcactgttctagtccctaagccctgctccctagaattacttaaaaaaaaaaaaacacttgcatataagctagtgcctcattctctgccatcaaaggaactcaggtaagataactggcattaggagtggctttagaaatcagtttctcaagatgggactgtggaattcagtgaagaccccactgctacaggtgagtgaagtagtattaattcctagtatgttcattctttagcatcacaaatactaacactcttacctgtggtggattgggataagctagtggtagagggtaacgtattgggttatgtggtggctctggtatttgaaaaatacatgagcagttggctggctttgtcaatacattttcaagtcttaaaaaaataaactggaagaatcaaatgaactgactatcaactcaggaaatcctgctgaaaatcagatcgatccagaggaaaaaaactaatagtggcaatgctaccaaagagactaaatgcataaccttggaattcctcctttgtggaaattctaataggaaattccaataggaaaagaatgggacctggagacccacgtggtacacttaggaagacagtaagagaggattttcctgaaacctcttagaaggcaagaaaagctcctcccctcttgccaaaggaaataagtctgcctttaaaaacactgtaaagaacacatctgaagcaggtgcctctcattctgactcctgtcctcaatatgtgaccccatctctctgtagtccctacaggccaataactagagccaggtcatagcacaactacagctggaaaatacagtccctagaagggatgaatatctaggaggaaatagtttacatactgaaggaattgcaatggaaaggcccggccaattacaggtttgcagaaatcaggaagcacatgtaggagtgaactttgaggaagttagactggaggtagaatgggatagagaatttattggcacagcaacactttcttgtgaaatgatattcaaactccttgcagagatgcctataggcattcctaatatactcctgggttgatggcctaggggatgaggtgacaaatgatgggaagactttggcaaaatattgaaaaagagatcagaagattaagaaggtgggaatgttaaaatggaagtattaattttatgtgagactgaaaattgattacctgactctgtcctaagatgcatttctgaaggctctcctaggatgcccttgtgggatccagcacctgtcactcacagggtttcagctcaatatggctcctatcattggctttacccccttccacattcactctcctactccctaatttctgctccctaagattgtttcccatataaactccttgcacaaaggctaagacaggctgcttctaagaagtagaaattctaggcaagctaaataatcctgggactgcacagggccctaccactacctccaaaaattattgccagatgcattctactatggtgtctaggacatagcaggtccccagcagataatttgctcctccttttcttcccccttcatctgaaacagtaaattcagatgtcagtgaaaggcaaacaacttccttgagacagagcaataatgcttgtatagcaattgcaaactcttgtgctctgtgcctaccaaaagcccctcctgaaaccactcttctttgggcaaatctctgctctttatttctcagcacaccgttgtcactatctagcctcaggataatagtgtcccctggagggatcagttcttcctctggggaaatcaaagagcagatcaggaattagtcaccagattgtgtcattttgaatacaaggaagaaaagaagaatgagaggaaagaaaggggaagaggaggggtggaggaggatgtgcaggtaagagggaagaggaggagtcaggcagtagggtggcaggactgtatttggtgagttcacacattttattttatttcagcatcacaatacatttgcaaggtgttctcctagtcatacagctggggaagctaaggcatatggtccctgttttaaacaaccgattcttcagctaaattagcagctaggagttacaggttgggccacagcatgagcaagacacaggacttgatcaagaatgagggaaaccaagcagatcggatacacagactctttacacttctgccttcttatagcttgtatttatttgtttataccaatttatggaaaagcatcacaaaactattatagaatacagacagctagaatattttcattttccctctgcttaacaagaaatggagcaatttccagggaagagggcccagggttttgtgaagagaaaccccaacttcactgaaccctaagttctgatgctgccagaatgaaggagcccagaaatcagagcaggacacagggatgggcagagaggtgagcgcatggggttaactgcaaaatgaacttcacaatgactctcctggagatttcaccagactggagtttcttgcagatcttcacctgctctgctttatttctggaaggtccagagcattacatcacttccctctgcttccctactgagatttctacccatgaatttctacctacatccatgaaattgctaatttcttattccactgtatcctttcttgagtttcctgctgaaatagtcatacctcttagccatttcagcatttttctttaaactagctactttgtaaattgtatattctttctccacttccagaaatatcaaagcttcaaagactcataatagcctagaggtgaaggggccaatatttttttttaattaaaaaaaaattgtcgggcacattggttcatgcctgtaatcccagcactttgggaggccaaggcgggcagatcacctgaggccaggagtttgagaccagcctggccaacatggtgaaaccttgtctctactaaaaatacaaaaattagccaggcatggtggcggccacctgtaatcccagctacttgagaggctgaagcagaagaatcacttgaactcaggaggtggaggttacagtgagccaagatcatgccactgcactccagcctggacaaaagagcgagactctgtcaaaaaaaagaaagaaatatatatatatatttatatattataaatatatatataaatatataacatttactcaagccacatactatttctattaactttttcttcttttttataatttcatgtatttttttaaatttacttttttatttcaataggtttttggggaacacatggtatttggttacataaataagttatttagtagtgatttctgagattttggtgcacccatcacctgagcaatgtaccctgtacccaatgtgtagtcttttatccctcacccgcctccgaccctttccgcaagtccacaaaagtccattgtgtcattcttatgcctttgcatcctcatagcttagctcccacttataaataagaacataccgtttggttttccactcctgagtaaaactattaactaattagttatcggagcaatcctttcacagaacagttattatctccattttttcagatgaggaaactgaggctcaacaagattaaataactagtaatttaatcaagttgtgtaagaaatggaaagaactagagcaaccagaaagcggcagagctcaggatttgaatataggtaagaggctccaaattcttcactcttaaccctagggattgtctaacccattcccttcattttataaataaggagagtaagacacaaagaaactaagtgacatatgccacgacaaggtagggtgtggactgccatgcaagtcttctgatttccagtttaatgtttttgttgctatacaacacagccttggttccagacaacagttctcatgtctagtctatgttttctggtggtttcccatgagttcttgaattgatctgaagatttacaatttcacaaaggatgttcattttatcaaggctgtatagaaaaagcacttgagattgtaacgatttacacctggtcatttggggctttagcattgggtgatccaaatgctagctcttccctcattagatgtgacacagcttgttctttaactctctgggaaatctagttgttacagctgaggggacctgcaaattgtaagaaatatataaatcccgttattacaacaatgatgatgattagtcctgttaaaagcacaatgttttacccattatttctgcagagtttgtgaaatggtgacagggatagagactcagatggtcattgtttctcaaggtgggaggacctgatgctgtgatcactgctgggaagagggaaggctgtgagtaaaagctaggaaatgcaaaccatgttcctacttatgcaaaccatgttcctacttattaacagctctggataatagctctgtggggtaaaatgtaaatctgtcaataaaggagatactgtgagtcatggaaacctacctctgcatgcaccccttctcctgggcatggatagcatgcatcattgaccctttcactgtagctcttactgtagcattgtgagtaaagcttatgtaaaactgatcacatgtggtattttggctgttttcccagccacctccattgttggagattgtgggcccctcaagggcagaaaccctggtcttttatttctgtatttacaaagccagtaacatggttggcactcaggaaatggtggttgaataatgaatgaatgcacgattttatgacctcctcagattgcaatcactttgctttcattcagcagcccacgactcagattcatgcactgagtagtcctcccagggttgtggttgggtaggactaactttggggtatgggaaccaataaacttttagggagaagaaaaagaatattgaaggctagaaatttttttcaaccagttttagagaaccactgtttagtagtgctttaatatttcatcatccagccaccaaaggatgcccacaactccctacacatcagaatattttccttatatatgttttaaaaataagaaatttgttttgtaggtaatctgatacctaaggagatacacagagagctgtagtttggggcttcagagacgatttttaagactggaagagagaaaggatggagaaaaaggccaaagaggggagatggcaattcacaccctctttgtgtgtgcttcaatatcaaagattccttaatggcaggaaccaggtgtaaacttgatagatctcccacagcatctatcactgactgtacacacagccaatgctcagtgaaaattagatggatggatggaaggattggtgggtggatggatgcacagagggagtataatttgctattgccagcattaccaacagtcacctgtaagttgtttaactctagtcagaatgcccaaataacctaccagtttgataatcactttcttactcatttatttcctctggactcttcttcacacagaactaatattcacttattttctgttctttattaaattattcaaaagaaacccttacctccctcagcacccatcagtaaaactctctccatacacaagtatcttctcacacaaatcacacaacataatacaatggtattctcacttacggtattgtgtctccatctgagaaagagatgaagtcagagacagagttaaagtctaagagggatgttttatttttctgtttttttcttacttagcactagctatcctgtgctttaaacaaagaaaacaaaatatgctaacaataacttaacatttattcccagcatgggagtggcggggaggaggttaatgtagataagtccttgtgtaccgcactatcaatcataactctttatcacaaataatgcactgccattcccacagctgcacccagctgtttgggtcatctttagtcatgtccgaactcattctcagagtcctatcttccttctgtctctcccgtttttatgtagctctctgtctgtcttagcttttgtatgatgaagattttcaaggccaggttaagtcttgggctgggtgtagcctgttcatggagagacagtcttggaggcgggtggaaggaagagtcattagggagaaagcttggggaagatggaggcagagaatggagccaaatgaatcaccagaggaaagagaatcactggagaagtgcaacagaatatgtaggaaagactgtctcccagatatcttgctcattcgagaacttccagaaaagaaatagctgaaagagatggagaatgggtttgaggaaagtcatactctgttctgtgaaggattcattttgctgccgaaaggaaataactacaggagaagagagagacagaaagaaaccaggagtagggtgggcgagacaaagaggaagccatatggggaggggggtgggaggataagggtgaggaggagagaacatggcatgcagtgggaacactgttggaaacataagaaccgcccccagaaacaaaatgccagcatctctgggcaaaaaatctaaattgtcagcacatgtatctttgctctgagaaatatacacctatttttttttttttttttaatttcaggatgattccccattccaacatcagtaaaacacttcagactgagagactcagataatttccttcctcctatcgtgaagcatccccaggccacttcctcactgttcctcataaaggtgccatccccaggctggggtcccttggcagggaaaattcaggaacaaggaattgctcagatttcatatagatttatgtcttataaaactataatggaagaaatccattcgtcttcaaaaaatgagaaaaagaaaatacaatttttaatgattacactttccaaatacaatgttttattcaattatcaataattaatgtcaatatgagcagggatagcccaataaaacaagcaaaattagatactaataaccaaacaagctgactgtgttttggtactctttgttccaggccccctgctaagcactttgtatacattcttatttaacgagcacaaatacagtacaaagcctttagtgttgcctccgtttttatagatgaagaagcaagcccagacaggttaggaacctggccatggtcattcagctaacaagtatacgggccaggatgttgagagacccctggcatctaatcatgtgtcaagggccccaaatctcattgtaggcgatagtgagtgttaagtttcttccccaccaaatttttcctacacctcgtaatagggggaaaatggtttgaatctttcccttccctcaaatttcttccttatgctgtttataaaatgatcaaacattaggcaactgagcagaataattaaaaaactaaataattaatccctgattaatggtagttaagtgtacaaaaaaagggaaataaaaggtaaggttggcccacaaatgcctgccctctctaccacatttgacatgactaaacccctttcctttcttaaaatggttatttcttttggctttaataacacgtgcacctatacagctgaccaccacaatcctccttccctgtctccaccaggcctgtgtccttcactgaacactgtggctcctcctgccctggaactatagctgatgttcaaggctcagtccatagctcacttttttctagatactcttctcctgagacaactcagcttttctcagctgggccactgacagttgtatccactctatgctgataaattttaaatctgtaattccacgttccagactgcatagctgtaggcactacaagacatcctcactaatgtgtccagccctcagttcagaatttgatgcagcttctgtgaaaagcaagttcccactccaacttctcagtttccaccaatctatcatcatcccttcaatcttaaaatccaaaagccatcacacctgtaatcccagcactttgggaggctgagacgggtggatcataaggtcaggagatcaagaccatcatggctaacacggtgaaaccccgtgtccactaaaaatacaaaaaaaattagctgggcgtggtggtgggcacctgtagtcccagctacttgggaggctgaggcaggagaatggcatgaactcgggaggtggagcttgcagtgagccgagattgcaccactgcactccagccttggtgacagagtgagactccatctcaaacaaacaaacaaacaagcaaaaaacaaaagaaaccaaaagcccagctttgaccattttgtcccctgtattagctctacagaggacattactggatcctaaagaagtgtccttcaaaattatcttgcaatcccaatggccaccaaaattctggccctcatcacctcacatctggggaatttgaaaaaggcctgacttgcctccccatcttgatttactctttccccattctctcatatagtaataatgagattaattttcttaaaataaccatttatcataaccatttcatcaagtgttttttatgattaccttccagagtaaagttaaatgacattaatctacctttcagggttctccatgacctattggttaatagtaacactcattcagccatgggtagagattcaagaactaactaggctgtttcatagagaaaggatttaaaacaaaaatacactaatggtgcctagttgaactcatttacagaatgagagcatataagagctaaaatttaatgtaatgcaaccctttactattgcatgttcattaccacactttttttttttttggatgagaaaacagagctggagaaaataaatgacttaattaagatcacatatttccatgccaactcccaatatggtacctttctgatgatagcttgttgcctttcaaaagaacaactctgttccacttgtaaacaccacatttatctcccatgacttgttcacaattccattcaggtcaagttgattccaatataaccctcacataaacattcagtgtcaagtccaaatctttgttcatgctattattcccatttgaagaaactcctccttccctcgggcctctgtattctacgttctttgaaatccaggtcaagtgtcactccaacccctccaagatgtatcaaggctgtaacttcagccgacctagacaatatccctctactatagcatttgaattgtactataccaatgtgagacatgtaatcatattatttcatgtttactcaacatttttgtgtatggggacttcacttcttgactaaactcaacttcttaagtgagctggatcatgtcttttctattgtgttatccttcacagtgagtatagctctttgcaaagtaggtactttaccgtttgttgaaaatataaagaatctaaaaatagaatctgaaacaaaatcttcaataggtaatccaagagcccagagaaaatcaagtccatagacaaatcaagcttaatttcacaattagcttaagttaattcactcatttgacaagtatataatgagtgcctgcactgagctcattaaagtgctaagcattaaactgcaatggtgagtgaaacagacacatccctgccaacgtggagctaacagtctagttagaggaacacacacatatattaaaagtttaaccaggactctagagaacatgaaaagaagtgaacagatttgggatacatgattaaaggaaaggagtgagggccaggaaagaataaaaaataacttgtgaatttctggtacgtgcaacaggaaggataaccatgccattcccctgagttggagaaaaccagtggaggacaaggtttatgggggtatatcaggaaaactcaaccttgggcatgctgaacaattccattagcagaacctattaggtaaaagaagttgacccaaaatggtttcaagtttttttttttttttgacctttaccctattcattgtcataaacaccctatacttccccaaaagtaaaagctctaccaagtaggcctgagaagaggaaagcagaatcaaggactcagacagcccagaattgggtaattaaactaactgggtaggttagggttcactgaggcaaggagaatataaaataaatcttttcaatcaaagaaaataaaatctggcctatttatttctctttatcaagtgaatcaaaagcttggctaaatgaaaacctaaaaccaatctaaaagaggatggctcctggtgttgtatacatccatgcaagaggtaggcttgcgtagaggctcttaatcttcactccccctctgagacattgttggctgctgtataatattgtggtataaatgaggccagcgttctggattaaaatctcttcaagcctcttcattgatcacagggttggaaagaaacatagaagttcaatacctcatataatcaaaaaatcaaaaaactttggaatcagaaggaacgtagggctcacgtcttctaaattctttctttccaagtaagcatctcttgtaagacattattttacagagaagaaaaccaatcaaagtctgaaaaggtaaaatgacttgcctgcctaaggtaacacagcaaattagtgacaaagctgggaaaagaaccatgctctcttgcttcttgccactataccatacagtctggagggaaaagagaagggtctgcctagagaacagttcctttcggaaagtaatttgagatcaagttgatgatatctagggatgataatttccattctaagtttcaatttgctaaatgaagcccccataggtacttaatcacatgagtaaaatgaccgaaatgatacttgaaaaatacaaaattcatagtagatgattttgtgatattcaagatatgggaaatagagcagcttgttatagaaatctaggcacaagctaatgaggatagtgactctgcaggtggcaagaaaggatgacttaacttaggggcactgtgcagggtgatgggcgtctgactgatgcagatataaaaggaataaagagcagtgaggaatcccttccaagtacgttactgattataaagcccgagaccatgggaacgctttatgtgcacatagcaaatgctgaaaactagttcaaagcctaactgcttctgccaatgaatccaaagagtcattttcacacatgaagatggcatatttaatctttaaaaataataatcaggttttgtactccacgtgcacaaaccccaccttttatttctttatggattcattcacattttcattcaatagaaaatgtttgtgtctactgtgccatgaatcctagggtggataccataatgaatttttaatgtgaactgtttgcacatctatgtgctatgccataggtatgaacaaagggctatgggagcacaaagagaggaatgactaattctgcctggaatcgtcagagaaggcttcagagaggaggcaacacttgagtcagatcttaaaggacacctatgtccttccagggaaattgaaagagaggagcatcacaaggaacagcctatgcaaatgcatgaaggggtaaaagactgccatactaagagagtggccagtaatgttatttgatgttgtgagatcacaagcagtgtatgttggcataaggtggggagttggaggagagggtagttaaataagataagcccaattatgaaggttaaggccggatattcaaaggtcttttatggcttgccaagaaatgtggaccacatccagtggataaaataagtcatcagagatttgtgaggaaattaggtttctgctctagatatccaattctttattatttgcagcacacagaaatcttatttgagccaataaaacatggttacaacttctttctcatacccaacttgatttgagaaagactactatagacactttgaagtcttcaatgataatgtttccatctaaaaaagtgcagacatgaaggtgataggttttttatcatccaatgcgatgactagacatcagcttcctggaagatgcttgttggggtctttgtcatgcctttgaaattgatgtctggtcaagccttgggtctcattcctttgtgaaggaaagcatactgtatttgagaaattttaagcatatactcctacaaggagtcaacctccttttccctgaattaaattcataaaagcagggttttcattgtctcatggcataatgctgctatgttaaggcagactgctctcctgtcatgatgctgctgctttttcagcagaatctcaatagtatcagaatgggccaatgcaatgcatgctggcccaacagggctctgctcaggggactaagcacctgggcattacaggatcacgccctaatcttatttatttctgaaatccctccttctcatcagatatatcctgttcctttatgtctcctgtcaatttcttatagacatatttccctgctgcttaccaataaccagaatgactgatacgacagctgggacaaccgagtgtggagaagtaggatcctttcccagggttcggaaggaatggaagacaggatttttttttttggaaaaaaataacctcaatctgaagcacgtgtcactgccagggctgacagacatagcatgtgtgtcctttacacgggattcagaagatttccaaggctgaattgaatgctgggcttgcttgcttttcccacttctcacttttacctttgcaatagaaatagaaaaagaaacatttctcagtttccttgacactgagaaacatgaactatcatctcccatagaaaagcgggggggggggggggttggcgggaataaacaggtggccactgaactcctggatgtaccctcagctcctctgctcctccaggacagcatatggcatttctaggtcacccttaaagtatggcagccagtgcagtcaggcactctgggcagattaactatggtgcctcttcctctccctttctggttctcaagacaacaccaaatagccaggatgaaatgaggttgacatcacttcaggcaagatggaaacaatgacaaccaaggaaaggaaacccctgtcaagtgcaaggaacattaataatggacacagactcttgcccactaaaatgtccaggtcttaaattgtttgaggatgcaatgtagtagctacatctcatttcacccatccttaacctcaaatgcagaactcagtattgctttgtgtgtcggtgatatgaaatccagaaaaacgtctatttactttcaaataaaaaaaaagccagctaaacacataatctcacttacactatcagtcattgttcatatggaaaacaaggatttagctgcctacgtaagatatttgcaatcaaaccttgagaagccaggtcaatattagaacatgcaatatatggccgggccaatcatgcctgtaatcccagcactttgggaggccaaggcgggtggatcacctgaggtcaggagttcaagaccatcctggctaacatggtgaaaccccatttctactaaaaatgcaaaaaattagccgggcgtggtggtgcgtgcctgtagcgcctataatcccagctacttgggaggctgaggcaggagaatagcttggacctgggaggcagaggttacaatgagcagagattgcaccattgcactccagcttgggcaacaagagagaaactccatctcaaaaaaaaaaaaaaaagaagaagaaaaagaacatgcaacatacaatataataaattccttgtcaagcccaaaagaggaacatgcattatgtggcaattaataaatgcttcttaatagttattagttcttccctcatattacacttatggggaagagactccagaaagctcatataatatcttttttttttcttttttttgagatggagtctctctctattgcccaggctggagtgcagtggcgctatctcggctcactgcaagctccacctcccaggttcacaccattctcctgcctcagcctcctgagtagctgggactacaggcacctgacaccacccctggctaattttttgtatttttagtagagacagggtttcactgtgttagccaggatggcctcaatctcctgaccttgtgatctgcctgcctcagcctcccaaaatgctgggattacaggcttgaaccactgtgtccggctgaaagttcatataatatcttaaatgtgaaatctgaagtttggcgaacaggcactctagattgatttcttcctgctcattccacaaaactcaagtccgatgaccttaaggacgtgatacaaaatggtgtctgttcatccaggcacctttgtgataaatgctagagagataggtggatgagtggaagaaagggattgaagccaatgataaaaattacctaataatctcctacttgttaagtgtacctggaggttctgccatggttcttttctcagaaatcataaagcactttaacaatagtaataagcatttctttctcctcttcttcttattcctttagacaaacgtaaagtttccaagtgtttaatcagatagattacattaccctacccataattctgaaaaattatgttctttcttaatacagtttcaaagctataccttggccttgcttgtccacagtagacattgccaagattgggctcggtcagaaccacaaaaatgccacacattacacatccacctacaaaccctttccatctcaactggttcccctgaaggaggactctcccagcctccaggagaaacactgtaagataaagacaacccaccatttcttttcttaccttggcacttaccctgtgtgtcttattctaaacactgcttttccttttatctgcagtacttcagaaagccatttcattaaatataataacagtgtagtaatacaaagaacatcactttctagtgctaataactttcatttttaaaaccacttgtgtactccaaaatttagcaaagcatcaatttctcatcaaggccagccgacacatcaaatttgaaacttcaaagttctgtttcttttgggtttataatctatgtacagaggaattgaaatgctgtttaaagtcaaatttgttttgatgctcatgttgccagttttactgatgaaaactcatccctctgcataaaatagactcatgaagtaccagcaacaggaacagaaaccaaattaggaaatcatgaccacctgcaagaggatcaccatgatgaaatgttcatatcctgtaccctttccaaattttgaagttcatagcaccagtggaaatcacaattttcagactagtcaggaaagaatgaaaggaaggaattctttcaagagcaccaagttcaaatgcatgtgaatgctatcattgcattttaccctattctgataaccgaggtaaaaaaaaaatgacaggagactggagaacagtgatttacaactcctggctgcccttaggaatcaacctggatgcttttaatacacgtctgttcccgggcccttaccctcttccagtgcagctacatcagaatgtgtgctgggtggggccttggggtctgtatacagtttcttaaagcttctcaggaaattttaacatgcagtcatgactgagaagcactgacacaaggaactcaaaacacagaaaaatgaaaacatggtgaagacagcacgggaggaagtcagcacatcaatacatccctgaggctgttgagtcagtatcagttgatacactttagaagactcttgtatctgaaaaagaaaaatgtggctaggtgtggtggctcacgcctgtaatcccagcactttgggaggccaagacaggcagatcacctgaggtcaggagttcgagaccagcctaaccaacatggaaaaaccctgtctctactaaaaatacaaaattagtcgggcatggtggtgcatgctacccagctacttgggaggctgaggcaggagaatcgctgaacctaggaggcggaggttgtggtgagctgagattgcaccattgcactccagcctgggcaacaagagtgaaactccgtctcaaaaaaaaaaaaaaaaaaaaaaaaaaaagaagaaaaggaaaaaaaaagctaacttctgatgatcctaaccaacctattttactgggattactttattcaacattactgcctctaccacatagcttccctgccactgctctctactgttcaccaaatgtttggggtaatgctggtctctcctggccagagagatggtgaatacctgggctgttccgcacacttctgagcactcagtaggtactccccggtgtaatacttgtggctgatgagaaagattctgaaaaaaaatagctgattgcatggagaatggttctaaacacacaagtgtccaacttggctaaggtggttaattttggaactgggctgaatttggaactgggctggggaaggaagcgcatccctaaggattgagccactagaggccgctctgagccagattctcactaaatcatgctatgaagaggaatcacatcaaagggaaaaggaacgctgctgagtagcaccgggcgtcatggcaacaccatggttcctatttttaaacttagtgagtgagcccacaaagtgtgggtgtatgcacgtgggggaaggggactctggtctattcctaaagaatattctttcatgaagttttgagtttgcaggtggccaataaactgagacaatgagattagagaatcaaactagaatcagctatattggaatggttcctttctcctgaactccactctcttagtctctatcagaaaggatcctccatggccttggatcagaggtaccaggaaattcgtgatggttttcactaacattctgaaattcttcgttcctgaagctcattctgctagtcttttaggcaattcactttatatttcaagaaaaataagtctaaacagcaaactaaaagcatctgtggacactccactccttgtgaagacaatcagatgaatgctatgtattgtccgtattcccggcatccggcacagggttcagtacatacagaatagggggtccacattcctactggatgtgtcactcagtgaattaagaatgaatgtaattttgtgaagtgcagaaaagtgggccccacatgtcccgtttctttcatttctaatagcattttctttttttttttttttaacttttctccaatctccagctgaatacaaggcttaaacaaatccaaatttatctgacctgtcaaaaatgaatagtggtactggaggacatttgtaaatcatggcagaggccaaggtcttgttttgttctattgcatgtccctgacagtattttcaatgcatctgtaatctccctgaaccttggcaggttgtagaccagaaagtctccacccgcttcagttccaaggatttttcaggtatgcaaagactacaagttgttgttttttcctctatgggttaaaggatttgggaataggataagaaaaaataatcctccttcccattaggaaaagggaggtatcagcaagatcagagcaagaccagcaagtagagatgggcacacttcaggacagagagtgagatgagcaggttcagtgtgggaagtctttaccatgtgtgtcctggatgccactcccaggctgattctagatgtgtcatggtctagtctttagggcaagaaatagcagagaatccaagaaagtaaactatttatttattttattttattttattgcgatggagtctcactctgtgagtgcagtggtgtgatctcagctcactgcaacctccacctcccgggttcaagcaattctctgcctcagcctcccaagtagctgggattacaggcatccgccaccacgcccggctaatttttttgtatttttagtagagacagggtttcactatcttgcccaggctgttcttgaactcctgacctcatgatccacccaccttggccttccaaagtgctgggattacaggcgtgagccaccgcgcccagacaggaaactctttattaccaaaccaccctgtcccacaggttaatgatatgtttatatacatgtgagtcattcctaattcactcaacctctttagcaaaggacatagaaagatggataacctggggcaaagtacgcctggaattcataaaaatttgagtttgaaacacaaagtaagcaaaagtcttaatctttctggatctcagggggtttggggttttttgttgttgctttcgttttatttttttgagacagggtcttgctctttcacccaggctggagtgcagtggcatgatcatggctcactgcagcctctatcttcctgggcccaagtgattctcacctaagcttcccaggttgctgggactacaggtgcatgccaccatgcctggctaatttaatatttctgtattttataaagacggggtttttgccatgttgcccaagctggtctcaagtgatctacctgcctcagcctcccaaagtgctgaaattacaggtgtgagccacctcactcaggcaatctcagtttatctaaaaattggaggcaatcatatccctgtacaatacttttaagcttaaattatgctatataaagcccttggcacatagtattcactcaataatcttttttaaaaataaattttctaaattgctgaagcttagtattttaaagtacaggctttttcttgattataggaagcattttaatggaaaatttcagaaaggcattacagagttctctgactttttatacctaagataatcgatataatttaagctcttattgatgacttaacaatgactatgcttttttgctatacagggatttttatgcagggtatatgctttctggggcgtagatgacatttctccccaaatggtgttatacaactctgcttttcaaggttttctgctgggtttttctaatatcttccactcttttccattctgttatttattaatgctgttggtttgcctatctgatcctcatcatcatgtctgttatacctaagctattgttatctaggaaatcatataaacaaatatctcaaagttgtctaccaaagatatggccttggccctctctcactagttaacagaactttgtttttttgtttttgagacagagtctcgccctgttgccgaggctggagtacagtggcatgatctcggctcactgaaacctccacctcccaggttcaagtgattctcttaccccagcctctcaagtagctaggattacagatgtacaccaccacacctggttaatttttgtatttttagtagagatggagtttcaccatgttggccaggctggtctcaaccccctgacctccggtaatctgcctgcctcggcctcccaaagtgctgggattataggcatgagccactgtgcccggcttagaactttgatttttaactgggcacattactgcccaggttaaaaactaaactaagctatatttcccaattttgcttgttgctagtgtggccattgactgatttccaaccagcagactataagcaaagtgtggaacttcaggggaatttcctaaacagggaaatgatttaccttccttcctttctaacttcaatctgctgcttgaaactggagttccagcagccatcttaggcatggggatgaaggatatacccagtggatgaaagagtggaaagctagcaggcatctgagtcctgatgacatgcagctgtcatcccagctctggacagaccacctaactatgctcacatatctcatttaaactgggttactgggactccacaccatagataacccaactgcccacaagcttcttagaagtatgtgtaaaattagagtaaacgtgctttgagcgacactctgtatgacaagaaacagcagtcattttagggcaagagttttgtgtcagggattttagctcagagcccttttctgctttcttcatgactgttggttatgttctagatacatcaggttgttgaatatgtgacctcttgtcctttaggtaaaaaagccaagtctccatgtgaacacatgtgagcacgtgtgacagaagtgaggacaatgaccccgtgcagcctgtggagtccactattttgagtcatagtctctaatatgcacacacatacacacacacaccttgtcctctatagtcaataatgagggaaatttgacacattattaagatctgtgtaatagtgaactgtaatataataatgctctattgtgctgttttgcctaaacaaaagtgcctgaaagattttttttcaagcaggggaggaagaaagtcaatgggagtgtctggaaatacctctgagaaaacaaaaaggaagcaagtatgtgaggtttctctgttgaagtccgcagccaatccttgcagtgaataaaagaagccttcacatgtttgttataatgatttagtgagacgatatacaagaagattatctgtatgaaaatcctcactttaatcatcatcattattagccatgatgatgaacaacgaaatttttgataattgggttttttgtctaacactaaatgtattttgacacctacctccatctggaccccatctataatctcttttggaaaattgtgaaaaggaccacttacaatgaataccatattgtcacagggtggtttccatggctattcctgttgcttgtcaggggagaacttaactttagaaaaagaagattcatttataggctcatcaacaatttataaaaccacttgactactaagtttccctccttcgcccaaacaataaatgtgctagggatatttagcgaccatccttacagccgtcaagactttaacaatggaatcagattggaaggaaatatttacttgatattcatcagagctaattccaggcaagccattttttaagaattcctcccaacttctatcccatattcaacctttctcatgtaatcatctaaatagtctcagcaatagaaagcattagagaaatgtaacatataaaagtgttttatccagttttcttaattctctcttcacttgacaaatgcaaatatacataaataggtgctgtctggatgaggaatacatgcacacatgaatatgagtgtgtgcgtgcaagaattccacaggcggtcatttatgaacatagaaaggtaaaggcaagaaaggttttaaaagctttaaatgaaagctggctaaagaagagaggggcagcaaaagatcaatgaacaaaacacccaataaagaaagagacagaaaagaataaagaaagaaagagggtggggtgtggagcagtaatgaatgagggaaagaaaaggcctgggcattgagggaagctgtaggcagcccccggccggctgctgctgctggaagctggacaagagggaacagatttcagcagcgggaagccctaatctgtcagcagcagttccttcatgtgtgaccagccagctcagcttggagactggtgccagtctgggcgagctaaccccaccatgtcctcccggaagaggacgcgccaccaaaaatttctgaaagccgagggaaggttctcttgctagctcctgccacatatcttccttggcttctcccgtgccctatctacagtgctgttcagatccctcagtagtcatcctaaatgccctgcttcttccaaatccttatcggccacatcagatcctggagaattttctccaggacatgaccacctatgcatccctgacagcaccatttgagaggaaacgaagagaaagactcaaaccattatctatttaaattgtgcaagatctcatgtagatataaaagccacacaaccatctctgctctcgggaagctcatgttagttaagttgaccttgcacagctgtggtccagccctcactcaggcttccagtccatgtctgtaaccagaaatgacagcactccagctttctggcaactcatccccatccttacccccacccaggcagcctttatcctctggtgggaagagagagcagatggagaaacgactcccactcaattcctaaataataccagcttcaattcccattaactgtgaatttgcatccttgtctaggtaagaaccaagggagcaagagccttggggacgctggcaggccagggcaaaggttaacagcaaagccctggctgcctgccagcctgcccttctgaggacatggccaagcagtggagaggtagcatgctctagcaaagagcaccgctcctgccatcaggacacctggcttctgtgcctgcccagcctccaacagaggagtgaccgctctgagactgtgttttcacatatgtaaattccatcctaccatctattcattaagaagacatgcattgaaagggttggattagatgagcactaaagactcttccagctctaatgctttgatgctaaggaaagctgagctttctttaaagcttccttaatgtgctgcacagtgaggggctgaaatccaggacccctaaggcagatcaggtcagtctggcatcacacagcctgagctggggatccctgggcctcgggttccttaaaaacatataaaatgagaataatgattcctgtcttttcattcctgctttttaatctgacaaatatttatcaattgcctacttatcaggcactgtgctgagaatacaaaggttaaaaaaaacaccttgctctcattgagcatgaattctgctgggaggagggagacaaaaaaaattttttaaatataatttatacagtatatcagatatgtgctatgtcaaaaaataaagcaggagaaagggacagagagtgcttgggagggtggggaatacaagttgcccttttaaacagagtgatcagggaatgtctctcgaggacatttgcatcaggatttttgcagggatcaaattaggtaactgcacagcgctggggatgcagtaagtactcaaaaaggcaactaacgatggagttcataactttcgcagcctggctgacaactggggctgatttaaatatatacctatgacccgctttttaacccatgccattgtcaccaacccacgtcctttctgaggcagaatctgttttcagaatgaggcttgtctgctttctccactgagagccattaaccttctcgggtttgcttctgccttcaagaccatcctattccttcccatagaccatattccgtctgtatcttcttcccctgcacagatgtgcattctccaccccactcactgtcctcagttaaatgtaactctttccccactcactcaccctctgtatcccctgccctctcctccaaatcacactaattttttaaaggagtgatacagtttggatgtttgtcccccccaaatcccatgttgaaatgtgaccccaatgctggagattgagccagtgggaggtgtttgtgtcacagacatggatctctcatgaatggcttaatgccctgcccatggtcatgagtgagttctcactctattaattcatgtgagagctggttatttgaagagactggcacttcctcccctcactctcctgctttctctctcaccatgtgacatgccggcccccctccaccttccaccatgagtggaagtttcctgaggccctgaccagaagcagatgctggcaccgtgcctcttgtacagcctgcaaaactgtgagccaaataaacttctttataaattacccggcctttagtattcctttagagcaatgcagaatggactataggaatccattttgaactttatcgaaatgcaaaaaggaggaaggcgaagagaaaaataaaagggaggagaaagaggaagaataacaaaaaagagacaaagaagagaaacaccacctatattatgggtgagttttaaatcttagaagtcagccgcagaattagtgattaaggaaagaatactgtagggggtctcagtgttaaaaatacttgaaaatgcctttcacaagtttgacttcagggagaagaagcaacaatcatttactgaaatgaccatctatatgtctgatatgaggaatgtgaaagactagaggaaaacagaagagtttgaatcgtcctcccattcaatgattgttctgtacacagctaacacatgcattgttatgcctgaactacaataagcattgaatgtatcttttaggttattaggttcttcgattatttttcccaacttatatatccttttacactactgagcagataaagtcattccctccctctatatacaggtgtgtgtcattttactaaacattttgcattaaaatgtgcatttttgtgcatatacataaaaatgtagctttccttagactctggtgcacttctttaataagatgaaaagccactgtgccagctataccgcttattactatgcattcatgtaaccttttggttgtttcactgtaaattagattaagtgaagtgaacctataacatgcgtttgccttaccataaatctgcctgtgctggcactcatcgaacatttaataacaaataaaagatgggtaatgaccaagcagctcttgcccataatgcctaaaaactaattgactcaattcctcatttatttttttaacctttcagcactttccaggccaagagtcaaatgaggatcccatgagaacaatctggctcatacattggttccaaagatggggaatttgcctcaaggttgtaggaagattgagcttatcacagctctttcattaagaacctaagaaagtactttttttcacatcagttattcaaagtcactcttccccatccctcaaaggctgggccaggacgatccagccttttaagatggcaactttcactaagaaagaagaatttagggaaggaggaaacaaatgttgagtagaaaaactaaagacactggggaaaagtaattaggcaagattcataagaggtttgctatattaagatccatctatctcaaatagcatccgttctttctacaagttccaaaagtagctctgtatgaagagaagcagcgggctctcaggacagaaagagagcacagaggtatgtggcaggtgtaccatcacgtgagtgacagaaacagaccatcagagattacagagtacatggagaaggaaaataaccactaactgctccttggagaaatgacaaatgaaaaatgtagacgggtgcctcctaataactcacaatttcttcccagctcaggggaatgaagatgggtttggaaaacttacctaatcattttctaaacattttcagatcatctggtaccaaaacgtttttagacttttctcaggaaccaagaaaattcttcccttagagaatatatagcataagaaattctccagccctttcaatcaaataaagttatcagttggaataaaactctcttagcatgtcttgggctatagtatagggcattgtactatatttattaataaggcacaaatgaatgctatgaagttccaacagaaaattaatttttatatgtattcaaagtagggttgccagatttagcaaataaaactacaagagccccatgaaatctgaatttcagataaataacaaatattcatttggtataaatatgtcccatgcaatatttagtattgacttgtgctaacgaaattattcattgtttatctgaaattcaaatttaacttggcttaagtatttttcttgcaaccctggcaaaatgcctcctccaggcaacccagaatctatctggagataatcactaagtctataacaggccaagcttcaaggagttaagaagttatcagtgaggaatttggattaacacctgataagtaatgttcatttgatagtgaattgaaatagtgcatttaaggatcctccctgagaaggattttatgccataaaaatatattcttcctttggtaactaacaagtgaatcacttcaaatacatgtctctctttgggattcaggtatatcatataacctcttctctccatcccctaagtgtagacttaggaactttccccacgtggaaagaaagctgtaatctggataggtgtgcatgagacctgtacctccccctacaatgcttctagcagggaaaggggcctatgaatgctactgccttttcagaaggtgagaggagaagccactttcctaaccctacatccctagtgtcatgctggggctgggccactcccagaaatctcccagagagccttcctccctactgcagttgctgagaggagaatagcaggccaaaggaaaagtcatccttataaaacaaccagccatttgcagcaattttatttgcaaagatttcctgctgtggctaaatggtgtggctgcttggtttgttatttaaaagagtgaccctagtgagaccagagctctgaaggggtggagagtctgatttcagagcagggtaagtaggaggagcttgaactgaatgtgcctaattgattccactgctgcttttgagcgtgctgtgcctggtgataaaactgcagacttggggctaactctataaaccctgttagtcaaccccaatcctttctggatcctgataggaaactatactaaaatattctcaagacaggcagggattacattcaagaaccagaagaagatgtatttggatggagaggaaggaaaagaaagacaatggagataagggaagaatggaggtgtatggacaagggagacatccaagagatgtccagcgggcaggcaggtgcagaacccaagtaaaggcagggaactggggcagtttgcagaggaaatgctttagtggagaagtaggtaggtaaatctgaagacacttcttaagccgtacatttgggaaatcaagtgaagctggactccctctctctctcagtctctctgctctacactggtgcctgaggaattgatgaataataatccttattccctgtaggactgctacactggaaaagacggatgtgggcctctaggactgagtagggccaccttcctgggtggccacacgggagcatctcaggcctcagagagatggcaacaaaggttaaaaccaattgcgatttcagagatatgtggttagaaaccaggcttcagagatgacatttacattgtaatgtaacataagccaagcaggaaataataatatctgcagatcattgtttacccagcagaagttttaagttaaaagtaggcattcctgggccatatttatgagctttaaggtaacattcacttgatttcttcgtgttgttgggcagatgttttagtctcagtagtccttcactgttagctttggttgtaattagcaaacatttgggaaaataatctgaatcagatttgaatttaacacgaaaagcagtgggaggaaaaccaaagctacagaactgaatcaacagtacatttttcaagggaatctttattatcttgcaagaacagagcagaacgggaaggctcctgcagagcaggtgtgcactgagtcttggagggcgtcattcacttccgtgtgccatgcactgtgcaggaaatggggtcagagaaatgagtgctatgggagggtcactactctcacagagctcacagggaagggagataatacagcatgcaattgccacagtttgaagagtggctttatctgaaaagtacaagatgtagtgaaggcaaataatacagtaatcttattctgaagctcaggaaagacttcccagcagaagtaatgccaagactgaagcctgaggaatctgacaaatgaagagcatgaggcaggtaagggaacatcagcacctgtgtttggtgggaaggggcacgctggagagtaagtttaagacagagagaggaaagagctggaagcaagagagagcatggtgtttttgaagaactaagctcagtgttgcaggaaggtagcgtgcaaggcagagaaaagcatgagagaattttggaaagacaggcagggcccatgaggctgaagtctttataaaccatattaaggagaatggacctcattaaaggagcaatgaaaagcctctgaaaggtattaagcaagagaatgatgaaatcacatttttaattttgatcaccctggctgcaatgtaaattgaaaagcagcagaacttggaggaggaagatcatgtaagaagccctgtagtaatgcatgtgagaaaaaatggactgggatgttgtaggagagatgaaaacaagaacggcattccagaggtatggggagactaaaatccggggcaaacagtacgattgactatgaggtgtcagggatgtggaaccaagggcatctaggaaatttttattttaggtaactttgtaatagaatacatcattgacaggcagtgcagatttggctaggagagggtgggagactagtgggagaagagatagaagttgagctttggatactgtgagttcgaagtgcccatggaatccaaagaaacatatctggccacagctaagaatacaaatttagagctcaagggagaggttgcaaccagagatgtcactttggaaaatatacagacattaattgtatccttgggaatggatgagaaaggaagagggtctagaaccccaagaagtgcccatatttaagggatgcataaaacaggagtgtgctaaggagccccagatggaactggaatagaaggaaaccagagaggtagaagaaaaaccaagacaatctgtgccaagcaaggggcaatacctagggatgatggaaagaggaacctctagagagttgatggtggaagaatatcaagattggatcacagatataactactgtgaacctggtttgagtttcaaccctgaattgaagctgtactctacagactgcagtccagctccctgctagaagttacccactcaacctccactatatgttttttaacatcccaagtacaccttttaatattttatttattaagctagatagtgagtacctgagtatgcattaagtttttctgaatacctttctgtacatcttaatacaattaaaaataatttcaaagggatgtccaacacattgttgaatgaaagaaatcaagctattgaacagcaagtatacttatatttccatatatgtaacattgtgtatttatgtccatataaatgtacatgcatagagagatatctagaaagatgttcacgaattatttctacaatgattatctccaattagttggatttaagatcacttttatttctaaaacacacttctttatgttctatttagtttgaatttttataatgtacttacatagaagttttatacaaataataaaaccacgaaagtatagtatagaatcttctaccccacagagtcatttaataccccacggaggatgcactgcagtcacggctgggttatgcaagatgagggcttgccaaacaaaccagactaagagtaactgtaaaagccacctctatagcagcatcctcacccttaaaggcagaggctggaggaggaagagacaaaaaccaagcctgtttctttaaagaaagaatatccttcatacgactacagatccgcataacctgttcttcaatcttactacaatacggcaacattccaaaggtaagcggactggtcctcccttatttctaagtctcctgcatctttctttgcgatcaagtagtacttacagatcagagaggcctaggttcaactccaaactgaccactcacttgcaacatgacattgtataatttacacctccaagcctattctttcgtattgtaaaatagaaacaattgttaaaacctgacttatagagttattttgaggatcaaatgaaaccaaacatgcaaaacccttagagtaacatctaacacataataagtgctcaataaatgaaagttgttttggcaaggttggatccaaaacactcccccaatcatgaccaattgccatgcccaaggccaggcttcaacctgctaccgtcttgaactgttcttcctgcagtttctgaacttccaaccccagtctttgaagctcccctctcatctccaccatcaatgtgccctctgttccacactcacctatttagcatattggactggtagattctcttctcgtgggtgttgtaacaactgcttttgggctcagggatgaagctgtgctcagacagcatgtcagaagcagcagtggtgattatggcaattccatctctcactctggcggggaggccatagtcccattcatcatatgatacagagatgagcccagtggggaactccgcaggcactgtgtctgtatcccctgccaccagactgggcacgatccacgtgtagccatagccagtcagccctactgagttggccacttcaaagatgtaggtggcttcttccttggtacagtaaagaagaatgatggggctttgaagtttcttgagctgattctggatcttagaatctccatcgtccagggacatgtccagtaggaggacctcctctagctcccagcccacaaagctattctcaatggtgctgcggatcttgtttacaaagtcctggtagccagggaaataggtggtgacgatagaaaagatgtaccagtcatattcttccatgatgttgagcattacggaagcttgctgttcaattgatgggccaaactggaagaacatggaggattcatcctagaaaaagaacaggacaaaaaaaggaagagagaaaaaaatcaaaccaaagatggtaatggagattttgaaccaagtgggtacaaagatttgtgttcattacttatttttatataatgcctttacaagtttgtatttacaataaatatttttaaatatttaaattgcagatatttgtaatacttttcttcctaaaattgtctcctagactttacagaaaatcaacctatgtctatacttgccttgtctgaaatccttggggtttctgccagagcctagggaagctccctaaaatcaaatatgttaatatttctaaagcaaaacatatgaagagtcacatagtgtagaataaaggctctaaacggcctcatgtcagttcaggtcaggttttgttgtcaaatgagctatacaaacacaaatgcacatgcccacacagacatacacacacatacatactttccatttttcaaggcttttggatttcttgcttgtgaaagtgtatcactcagtcacagagtgcataatccaaaaatgtcattgagctacacataaacctatctacggaggtgagataagctcagtggtccagaaggtgaatggtactcagatacagatatcagggagaagtatacgtagtatgaaattggatcactatgtgttctataaacatataaatgttaaattaatatcacatttagtttgctctctaacttctactctgataataatatatgcagaacagaataaggctcaaacagtatgtctaagctgcaagttaaaattattgccatttgaactcatatctgattaagctttacttcagacatatagaagatatgctctttctctgacctacaggacaccacaggtcttggtttgacctgggcattgcacacaccctcccgtgtcaattttgagcgtcttctgatttctccttcctttccagggagaagccattttaaatgtctcccattttaagctgtgtttcacctgctgttctgagatatcaagtcctgcattttctctctacctttagctagatgagtccgaaaacacaaaatgaacaccctctcagtcttgtcctcctatttcccctgatttcctcctgggtaatggtatgtcttttcttgctctgtgccccttatcttctatcccattggctcatctccattttatagcaatccaggctaacaaaactgtgtcttttctaaggggcagttccttcttatcctccaatgagagcttcaaagtacagttacaagagacctgggcttttaaacaaaattacatagtggtttcttagttcaggaacatattgttgtgcagctgagaaattgctgagcatttcttcagcaccccttattgaaaaaaatacaggttgggaaatatccagctggtatccaaaaatcctgattcggcaatgagagctgccagcccctggctctgcctgggctatttgttctcacagcttgaacttttcacattttccacaggctacccagaatgaaaccctggatgtttggtcatataggagtaatttttcctggtaagggtgaaatggtgctcaccagcactctcttctctggacttaaagatacagttgaagaggagcttcataggatcatgtaattcaggaaagcagggagggtgaggcaccaagaataggtgagtagaaaaaagggaatgaattcacaatagaataattatatcatgtgtatctattccaaaccctggccagtccctgatcctagacttctcctactacatgagtacaactcttaggcaaagctgaccttgtcgttaggttaaataacacagtgggactttggtcggaatgtttgcatcctcctcaaattcatacgttgaaatcctaactcccaaggtgatggtatctgatggtatcaagagatgagtgaggccctcataaatcaaattagtgcccttattaaagaagccccagagagctaccttgctccttccaccctgtgaggacagagcaagaagatgctctctatgagtcagggcatgagccctcaccaagcaccaaatctactggcaccttgatcttgaacttcccagactccagaaaagtgagaaataagtttctgttcttttttatccccccagagtctcactctgtcacccaggctagagtgcagtggcacaatctcagctcactgcaacctccacctcccgggttcaagcactctctgcctcagcctcccgagtagctgggattacaggcgcccaccaccatgccaggctaatttttgtatttttagtagagaaggggtttcaccatcttggccaggctggtcttgaactcctaacttcatgatccacctgcctcagcctcccaaagtgctgggattacaggcgtgagctactgcgcccatccaaatttctgttctttataagttactcagtttataagtagcctgaaaggactgagacaagtgggaatctggggcaatacaattttattccaagaattgtcagtggcctacagaggacgacgacaggaaaggaaggccagtggcaaggtgacacccctagaatagctgtcactttaaagagacacccatttgtttttcctgtcatgcttccagctaaagaaaaactgggggattccgaaatgagaaatattatcacatgagcttccacaagcccagtggttatagcaaagtgaagaaactttccaatatgctttaagatgtacaagcttgggatgaaagggatcccagtggcaaacaaagcaggtctacctattctgtgataaatgaacagatcttatcacaagaaggctcttgaatagatgcaaagttcatgtgctatgaaaccacagctggctgaaatacatagcaagaggtacaaaagccacgggggtccatagtaaatgggctttgttaattagattgaatttagaagaaaaccaatctattaaataccaacttggccctcccctctgttaggcttctcttaatactctctctcccccagttgcaagtagcttgtaaagacactgctagctactgtgtgaaggaagccaatgcataatgagagtgagaaatgagaaaaattgatatggctccatcatccccaactacatccttaccgtaccttctagttctactgtcctccacaatctgatccttttcctgattcctctgctccgattgatgcccagctcaaccattttattttgccaagcccttattaaataaggatgctttatatgaccattttatctggcacccaaaggaggctaatgaagccaaacagaagtcaagaaacagaataatagcttgggccaatgtttcctggtataatgagtagtccagttattattcatttagttgacacatcaatatggtatacagtgatcaggaatgggacagctctttttcagtaaagctctagtctagctgtaagttgcaaatggtgacaggctttgcaaattatggccatagccacaaataaaagggaaatcttcatgtgtgcatcgagtagaaaggactggtggccacacatccatctttgcaggcacccagcatgcactgtgattaccgcaagttatcgaggatgaaggacagagatataattctgtttgtagctcactatgcttccccacttacatttttatctcctaatgtcattacaaaatgttgacatgcaggggtccttggagcagtctcctcctagtgaagaatcccagtcaaatttattacctgaatgtccttcttcaactcacctcaagagcatctttaacatattcctatataaagggccatcctaacagagatgaataagcagcacagggaaggtagaattgtacactagaccctaacagtctagaaccataatgtggggcccccatcattttgatgtttgtggtgtttatttgctaataagaataaaaaaaaagaggtgctttttcatcttattatctgcctcagaaaataattgcctaaaaaattagcagtacctaagattcctcttctgcatcatccagatcccttatggatccacttcataaataaaggattaagtgccccagcggctggtagtgcccctggcaatagggcttccactcaacacccttggggactgcctcagctaaaaaagcccacttccccaaagccatatccgtttcctggggtaaatgggactgaatgactggctgttacaggtgtaaagacctaatcttcttgccctaactctagacaactccaaagggtcagtttatcttcagaattcccccacaggatttctgaagcttccattaaaactgcatcacacctgcacttctcctgtccagccttgtccaatcttcccttcccactcatggtgctgatctcaaaagcaccccctaataaaccccctgcacactaacctcaggctcagagtctgcttccctgggaacctgactctacccatttcccccttttcaacaccaaaaagaaattgcttcaaagagaacatatctattttcaaatactgaaatgacttatttggtagaaagacaaatcttggctcattaaattcagaggagaagagaactgggaacaatgagtagaaatattaaaaggcattattgggctcaatataagaaatgcatttgcaaaaattataggttcttaaaatggaatgggtctcctaaggtagtgagctctctgtcactgtaagcattcaaacaagagctggattattatctaacagagggatttttgccagtacatgggctggaaaattttatgattatccttaagacccaattcaaatgtcaggtcttttaggtatgttatcttttctaactttccctggtcaacttacttctatctcccctttgcttttatcacatcttgtgcatgcctccgtcatcatacttacacagtaaacatgcatacttgccttatctgactaaaaatgtttctcaagaggataaactataccttgttcatctctagatccctagctgacacatgaaacatttttctagtgttcattgtattaatattgtagacgttttatttactgggtgggagagtaactgaaatgaatttgatgatctcatctagttcaattttttttttttttttttttttttttttgagacgaagtctcactctgttgccaggctggagggcagtggcatgatcttggctcactgtaacctctgcctctcaggttcaagcaattctcatgcctcagcctcccgagtagctgggactacagatgcgcaccaccacacccagctaattttttttgtatttttagtagagatggggtttcatcatgttggccaggatggtctccatctcctgacatggtgacccgcccacctcagcctcccaaagtgctgcgattacaggcatgagccaccacgcccagctagtttcaaatttttatgctgatggcacatatctacctcacagaaataaggcatgcctaaaaagttatacataaactgtgcttttacaaaatgtgaggggatccctgttgtagccagccagagtggcagaaaatgctatagtcacttatttacatccctttgtagcaaactccttaaaagcatcatctatactcaattctcctaattcctcttctcccattctcataaactgaatccaattagactttcaacaccaccacttcactgaaacccctcttgtaaaaggcaggtgactttgatattgacaacgccaatgtccacttgcagtcctccttatctaccagcaacatttgatgttcttcatccaatccctgcaagagcatgctcaatggtaccactggctctgtcttaaccccctagtctaatgctcaacaaagaaggatgatcttttgtaaacttaagatgttattctataccccaagccctaaaagactccccagtgtactacaaagaaacagccagcacccttgattttgatcccatattggcccttgggtcccaggccctcactctgctccatgcactctgatctgtattgaacacactcacacattcttgcaccaggcctttgctgtagctatttcccctgcctgaaacactttttctccagctacccaggtatcacacatgcacctcttccacgtctttgctaaaatcttgccttcccaacaaagtgctctcaatcctgaccacaacacggaatgctgaagcctgtcctcacttttcataggcatatctgatccccttgtccagctttgctttttctttttcccatagcatctctcaccatcagatggactacatgattacttatttgacatgtttattatgaactcacctgcctcttcccaattaaatgtgagcaccaggagggcagggatcggcatgtgtttgttcattgctataacccacaattatggaattgaggtctggcccatagggtgctctcagtaaatatttgaattttttaaatggggtcatggatgctgcaaccagatgctctcaaatctaacctatctttgttggctatccaactgtgattatatttttccagcatcttaaagtctttcacattattcaaatcttagtactgtataatatcatagggaatataatcctgttagtacactagtatagtttcagattaaatcaatctggtttccctctactctctttcctattatattaataaagaaaattctccttcttttcttctaaattcagttcttgaggacaatctgtgtctgaaaaactctggaactggtaggctttccctgagactttctccatcagattaaggaaggcaaatgtagaaatgatgggctaagaggccagggttacccagctgtcctgagaagttctgagtactccatcttcactccttccacatttagcacagagtagaagcagaatatgggagacaaaaaatctctttctcctcccaaaataaggggaaatactttcctctactcaccaaatcctaaatgatcatctcctttgatgagtagaaattctgataccacaccatcatttttttctggtgactaaggctggagttagttctttagcatggctttgaatagtgtcagagttttgcgaacagtgtcttgcaagatagggaaaatttccgatgttctccagcctcaccattaatcaaaaatatcatgactgaaacacacaatggaagcatattgatacagaatcatgatctttcctgcctgttaaatgccagacccattctttctttaaacccttgcacacaaaggagaacattctgagttttcaaagaaattcaagcagatctggcaagtttaagagccactctggataactaaacaacttccgcagaagccagcattctttttattatttgttctttcagaagataattgtcctttctacttgaatttggccccattttcctccctgactgagtctctcttcggatgtgctttaatcgccaaatttaaaccacagtagagaaacaaactaaaggtattcattcactttgagaatgtctacaagattcttgatattctaggtcacagagacaactttatagccagaagaaaacaacaggaagtgtaataagaggagaagaaggaacaggtagattccccatcactaagatacctaaacgaattacagaagtaagggagcaaaggtcctggaggatagtaagagcactttgagaatgtgtttgtgcccctttgtaaggtatcgggaccactaaaatcttaacaagactctttcatttcattttaaagtaaaattcctttcctaaaagcaatcaaacctactctcagatggactgacttgtatttttattaagaggtgcctttctataaaagagcaagctgacaagttcagcaacaatcaggttctgtgactgaataaatgtacttttaaataaacacaagggaagaaggcaggaaaataggaaaggttggaaaaaaatgaaatgaatagagaaaaggtgtgtacatattaaactaagtgttaattaagtagtagcgttatcaatatcacactaaatttaataaaatcaagtgtggtcaacacaaatataggtctgggcatttatagaataaaatgacaggcatcataaaactaaacctaataaccaaagggaagatgaatctttttctttttttggaagggagtctagctctgtcacccaggctggagtgcagtggtgcaatctcggctcactgcaacctccatctcccaggttcaagtgattctcctgcctcagcctcctgagtagctgggactacaggcgcccgccaccacgaccggctaattttttgtatttttagtaaagacggggtttcatcgtgttagccaggatggtctcaatctcctgacctcgtgatcctcccacctcggcctcccaaagtgctgagattacaggcataagccaccgcgcccagccatcatttcttattaggtatgaaatactaaatccaaaattgccttatctcatcaaaatcatcttatttaacttaagccgaaaggacagcatctacaaaagaactgtgattattactaaagagcagagttaagtgcaagccagtgatggcacttgacgtactagcggcatttttcagagtaaagatgttgacatttgtctcaaataaattaacattcccatctcttcaaacacatttgatcagaacatcacgttcatataccaaggggagcagagaagcggaagggtagaaaaggcattttatatttgattaagctatgagtgctagtacctcatgtgttgctgaaaataacacaagcactggttctagatacagtgatcttgcttgtacacatgggcctcttcaagggatccctgggaaacaaagggctctttgcccttctgtcccagctccatatggagtgagagactaggcatggctgagtttaaaatgtggatcagtcatgcttgtttggccacagattaacaagccattgtctccaaaggctaaatccagaaagaagttttctgagaaagttttttttttgtttggttttttgttttttgttttttccaccaaacatccagcgatgtgtttttctaggtctctagattggaaaactgatcactacttcctcacatatagcaaagtacggctgttcacaatcaaagaggctttgaatttattcacatctcccaaaccaatttggtcctccatctaaaagaggcaatgcattttgaagggctccagaaatgaaaataaaattgcacagagacagattaaaaaaaaaaaaatcttccaacaacttgtcagcacctgcatgtcccagcttcattcaactataagactttgaactttagtcaccaagtactgccttctgatctttaaaccaggataggccaagtactgtcctcaccgacaccatcttctaaagctggctgggctgctttacacccaggaattggtgcactgattgtgaacctggctgggttcagacatggccacccagatgaagcctgtcttttcgtgtgcctcccacgtactcaatccaaaggactaaatcacttcctcatgttctgatttttattccagtctcccgtggatgaggagccttattcagagcctccaactacattggacggtccatgagaagctgcctaaatccttgatgctgggcttcctgtacctacagatgccagctggggtctgacacatctaccgtttcctgttctatacgagatgattagggcattattagtgtcaacacatctgtgttgcctttttccattactttgtcaaactcctgcacacccacactagcctgaatcccaccaagggggttatctgttcttaaatagggactcagagcttgctgacctccaccctgtggcaggcaaccccatggcagggttaagtccaatctttcccagctttctgaccctccctagaccttggcctgcaatacaaattgtgttcagtgtttgattggttgcatccaagtttatttgagattttctttgttttctttatactgaaaattgctctccttttccagaattattcaactttttcttttactcatttatggctgctggttattagcactaaaaatggatgtttaagacttctgaggttctaactgcttaccttcattttcttttcttgatctctaactttcctgggaatagacacgtgaagtttcattgagagtgcaatacaatccactaggatggatgcccagctcctaacctgatacagggagaaacacacgaaaactacttttctaaccacacaattgtgtccgcagtcctagaaaagagcctatccttctctatatccataccaaaaaaaaaaaaaaaaaggatattagtttagaacgtacagaatgctaaggatccagttgccaacacagtcaagagacactctctctggcccagcccatcccctctgacttaccagtactaatcctgtcaacattcctggagcccatcttgtccctccttgctgcaatcagcactgcagcccaggctgtgacctcttccttctttgcctccatttttacacagtcctaattccacagataaagaccccaacggaatgctctaaccggctaacaccgttggcccaaaaagtgttgccatcctcccctgtgggaccttgggtagctgaaatgctgttgctatctcaacttgactctgggagatggaccaagcctggacaagcagcagaaatcactcatggaaggtgccaacgttgatggaaataagaaaaaatcttccctagaaataagaacttggcaagtaaaagaatggtctatttactcatttttattttgaaatttgtttacttgtttgctttcaaaccacattcagtggtctccaacatttctattgttgatggcatttcacccggatacttttcctctgatggaagttgacaagcaagaaagaggtccttgaaagaaaatgtcatttgttatttcaaacagaaggaaactcggggcttattcttgcccccatcctcgtcagactctggagtacacagtcactgttataatcagatactagtacttattaatggctaatctgaatccttcacaatggggcctctgcctataaatgaatcatcccagacaagtatgagtgcaacatgcagtctcgttatctttagaactggcagtaaatcaactcacctgaagctatcaggctcacatcggccaactgtgaattctgatccatgctaacaaaacaaaatgggggcaaccttatggctcagcaatgacattttgatgttaattcggtactgcctaaaagtgccaatctgctcatcttttataagcacagatgaaactctctgttaaatgccagcccaagatctcaaagaacagacactaaccagagtaccctgagaacacattagtccagctcatagtaggaccacaactaaaccggttttgtagaacatgaggtgaaactagattattttacaagtcttcaaagaaaagtccacaattttcttcagttacctaagccggtgagtccagaaacctgactttcagaaattcatctctttgtctgccttacgtccatcgtgctgcagattaagctctttgggtctcatgctctccttggtggaaggcacatgataagccctcaagaatattgtcagtatgaacaaaactgatgtcaagatggatgatggtttgtcattaccttgtatgtaaagattattactaagcccactctcagccttttcttcctgagcctaaacaatctccctttctaattcatttcttatagttcttatgacaatattcattgagtgcttatagcaggctccatgctgtccatgcagtatgtgaatatattttcatattccattgcagcaggccctgatattttctccattttaccaacagagaaagtgagcttcagagacatgaagggtcttgcccagggtaaccgctggaaagagaacctgtgtagatctggctcagggtgcacccaccaaccactgcagcacacgttctcaagtttcttttattcatctctgtagctctcatctgaactgtctatacatccttgtttctttaggaagcacagagtgattacagtagtctagtaaaagtctaacctctgcctagtatattacagagattattttcattaattccttaagcttcaatcccatgcatctatccactggcactgctaactagtgatggactcggtacacattattactctgcagtgttcttctactggacatgcatacaactgattctttgtaacattattgtttgctaatcaatcacatatttattaaatgcttatcaggtgctgtaggaagtagaaatgaagtataaaccatcatcaacctcaggcaagctaattggaagataaaaatatatgaaattattgacgatgttccttaaatgccatcatgaagtttagaatataagtatcctaagaatggtgagaagagagggcactatgtctggacaactctgtttttcaagcttctttctacttatccctctctttcccagttctcccactagttttgtgcagtgagcaaagtaaacatccatgtgcatttcaatccaaatgccagactgtgaaaagaaacataagaaacactgggccttgaactgttccttgtatttgtcctcaggtggacaatgagcctctgatatcgagtctcagctaatgggcataccatagagtatcacgtccaaatcacagctacagtctaaatgaattatacatatctttttccatgatctacccagcctttcattttcatctcagaagattagattaatatgacaggacttgtcctttatgaagtcaggctacccagttaaaaaacctttttctcttcaaatgattgcaaattgattttgttaagatttttattcttcagaaaagctgggggaatgataattcctcatctcttctcttctctcagtgtatttgatttctttacactggcctttttcctctagccttccgacagttttaataattatacacactggtcaggaaatcaatcatgatttcagcgttcctaccgtagagatgatgtgggctttcaaatttaaatccaagcaactcacacaagtagcctaatgttggccgggcacggtggctcacgcctgtaatcccaacactttgggaggccgaggcgggtggatcacgaggtcaggagaacaagaccatcgtggctaacaccgtgaaaccccgtctctactaaaaaatacaaaaaaaaattagccgggcgtggtggcgggcgcctgtagtaccagctactctggaggctgaggcaggagaatggcgtgaggccgggaggcggagcttgcagtgagcggagatcgcaccactgcaccccagcctgtgcgaaagtacagactctgtctcaaaaaaaaaaaaaaaaaaaaagtattctaatgccaaattttccttctccagttcaactgactagtccctgtgctccattcatttaaaaagacgtagatgactacctaaatgctatcagttctcaaaactgcctccatgtctgttaaagaaatgtaattttttttctaattttcttactgatgaatcaagagtatattttaaaggctgcttttattcttggcatgatgacattaagtggatatacactagcaatggcgcccatgtgtattaacactataaacagcaacatagtttctcaacttttgccaaaaaacagcatatgatctgagctagaggtacttccaggtgcaaatagagtaaggcacaatgtttttgtctgtatgttgatgcttattttggttatctatgtaacaatttaccaacagagttaccagatcatgggttaagtttgcaagttagtttcacacagatgaaagatatcttggtttgtaggaaaatgtcctcttttgttcatatttttgagttccatgaaggtgcacaggttatcaaaattttcataagagtccccaaaagacctctcatcaagaaactccatagtattagtaacctagttacagtaagttattaatattgaaatcttcggtgacgaagggtaagtttgtctctccttaattctctcaacttcttaatcctttcctaatgtaagggagaataacctcagattcccctctctgttccttcacagaaaggcaaagtttcaccacaataaaactcttcagctacctaattgtccttatttattaaatatgcactaaaagaggattttcactttgctcagtgaatgccttctagagtcagaattagttaagcttccttctttgatatgtcaactcatcatatccatcatgcccaattttccttttagactacctgccctggttcacagcttcagcttttctttgcacattaagtattgttaatcagaggtgggtacctggccgaagcagaccatcttgcagctgcccagtgcctgcagtctgggcctggctagaaaaatgagccagaaccatcagatcctctgtctctctcaggagtctgaaccaaaaaaacttgaaagaatggcaagtctttcacctataacatgaaacagagtaagggccctgacaaccaaggtcatgggcactgtgaagtaatgaggaagcagaagctatgggatagcaggggatgcctgcagtagagaaggaagtggctcagatgcaagtggaaagcaaagaacccaagatcttcaaaatacagaccatatgtccttgaggaagacccagtagggagccagctggggagtggtcttagttcctctcggctttccaactctaggcacaaatatcctcgtagtaaattgcctggtattttgtttttattttgttggttgttgtgcaacaacttagttagtctttgctcctgctaattaaaagagcctaattaaaaataagcaggtggccggcacggtggctcacgcctgtaatcccagcactttgggaggccaaggcgggaggatcatgaagtcaggagattgagaccatcttggctaacacggtgaaacaccgtctctactaaaaatacaaaaaattagcctggcttggtggcaggcgccggtagccccagctactcaggagactgaggcaggagaatggtgtgaacccgggaggtggagcttgcagtgagccgagatcgcaccactgcactccagcttgggcaacagagtaagactctgtctcaaaaaataaataaaataaaataaaataaacaggtataaaggctaccgctagttactatttccttgttttacagtatcattcttggaatttattctacagcttcccattttcatgaggcaaacatctgcctccatgacgtttaccttgctcagaatgcaacacagcagagctaaggtgagagtcaggtttagtcccctggcctgagacaggggacagagtgccctcagtaatgcaaggtcactcacacaagaaccctcccaccccctcaaggcccttttcttatttcccattctgttttcatcccctgtctggttgtaatattcattcaagtgtggcttttttttgtcacacggttctcaagatggatggcaagctcaccacattcatactcagtgtttcgtgcatatgctcccaagttcccaggcacgtctctggagctgtaagggtatacatttgcagcatttctccatctgttctttcatctatccagccactggtgtttattcagtatgcagctcatggctaacagagaattgggcatagcaagcagggacaatttacttggcgataaagtcaaatcatgcacttgaagatttatagtttgcttggagattaaatactgtttgcatcagcaagctgagtaatagatgctaacaaaaccatatcgccttcacaggcatagcaagggttaatcagaagttgcttacaaacgtgccccccaaataataaataagcaggtagatgggggctggtatcccagattatgtggggataatcaaagatgagtgaagctgcatgaaaccctgggatatggtggctgctccacatgtctgaagccagtgggactcacacaaacctccattaggacttgaggaaggttctttgtgcaatatcaagcagatgttaaactatgcggaaagttagctatttattttatctgaacttctattttgtttgagtttctgctcatctttatatggttcttggtttctaaaattttcactacatccagttctctgcagctgcaagaaatgaaatttctcctatcttgctctgctctctcaagtaccttatcagtgggtcctgaacaaaggccagattcaccagtattcagcttttcctcattgcacataaggctgatctgcactttgttcaaatcacatcattccccacatccttaagaatttaggatgaaagaactggctctgaccatcaaggttacagctttgtttcttccaaatcattgggtgtttcacactggccaatgaagtgtccatgatcacttcaaaagaatttaatgttcattgacactgaccaagtctgattcactttgaatatatcagaatatgacaaggtaagacattaagtttaccctatatcagaataagacaaggtaagatattaagtttaccctctgtaaaatggtggttaagccgttgtcagaaagactagtttctgaaatatttaataggcttcacagaaatttggtgtgtgagaggaggttacagagttacttgttagcacagatttaaaagtcaaataaacatcaatttagcccttggtattagcgtctcaacacaagccacaaagagagttagatatgtgctatttattcctgagaataatggtctaaaggtattctgtaatggacaggccctggtgtgtgttgttcccctccctgtgtccatgtgttctcattgctcagctcccacttatgagtgagaagctggaagccatcatcctcaggcaatttattatgaggatatatgtgcagagttggaaagctgtgaggaactaaagatattctgtaatggattctatctgacaagaaccaggggcaccagcctccagaaacccctacaaagttttactccccgtatttcttccctaggtgcctcaactttctgaatgatttcgacaactggtttctgtagccaccacttcacaatggctcctaagtaactgatatggtttggctctgtccccacccaaatctcatcttgaattgtagctcccaaaattcccatatgtcataggagggacccagtgggaggtaatttaatcatgggggtggatctttcctgtgctggtcttgtgatagtgtataagtctcacgagagctgatggttttataaagcagagctcccctacataagtcatctcgtctactgcaatgtaagacatgccttgcttccccttcaccttctgccatgattgtgaggcctccccagccatgtgaaactgtgagtcaattaaacctctttcctttatatatttatcagtcttgggtatgtctttattaacagcatgagattagacaatacagtaaaaaactaaaatttagactttcgttttgataaacctacacagttttacaaagaaagatttagtaagtagccaaggtaacaaagcaataatttcaaaacagagcagaagcatattgctgctataaaaaaaaaagaactggatttggaatcagaaatttagattcaaatctgaatacttagctgtgtgatctttgaaaggttatttaccatatccaaacctcattttcctccagaatataaaagtgctaattcttagctcatagaactgtaaagaggattaaatgaaacactacataagaaagtgctcagtacagtgcctagcacacagtaacttccctggttcattaagtgtgaatctattgaccacatattatagccaagaatatacgtgaggatgcgtttcatttcatattggtttacaaactggttacgttgttaaattaaccatcactttcattgtcctcatcatctaagcatcagtcatatctgatcaaaaacacagcttccgagtttgactggtccttcaatgcaacctagaacagcatgggctcctgagttgtcccttctgaatatgtcagaacactccacctcctcagggcctggtgtgggtcccactgatttttcccatgactttaggtcattcactcagctggatgattgctatgattcctggcccaagagaaatatcttgcctctttcctgcttcttactatatagtcagatgtctgaagaatgttcaacaacccattgaggatactgattccactgttccataaaagtcacgttcttcagctattattcccagctatcacccggtctcagatggatcagctccctctggggaggtttggtttgtgccactgatggctcttttaccatcaggttaccttcctttgccagccacaattccacttcactatcttaaggaaaacaatctctttcttcccatgtgaaaatctagatttcctctaggcttgtccactctgagttcttccccaatctgaggaatgccaccagctttttgtctcatctgcagactggtttgctctgagcataaagaaaagctaaaccacccacttctcactcccattcatgccccctgctcagtcgacaagctccacccacttgccctgattctttgggatgattcatcagctacagtgtactcgctgaagtatcaatttaatatcagcgcatcataattttacaatataaaattctctaagcacacacataaaataatgcaaagtaattcctactgataaagaagcagtatttaaatcatgtctgcacagagtaaatacctgaactaagagcaagaagaggtaaggcggaagtaaaacttgaaattctgaatatctgaatcacttaagacacaattctatcacaggcaagtttgcaaccttgtaagaggtttttttttcttttacaaatcaaccaatttctaaatatcttcacaggactataaaataatcacactttccattgctatttctcaggatcaaagccaccccctgctctatagcaaatgtattctcatttaacaaagtctcagcctccattctcacccacatcctcaaaggtgaagtaaatgctctaaggtccatcctctggaagggcccagagataccatggactatagatgggtggatttcacactccaacacaatcataggaagaactcttgagcagccccagaccaatggggtgatgggttggaggggacagttagaactgcaaaagtgaccagtgtttccaggtacccacctagtgactcacagacatgtacttggcaagttcctacccatccagcaataaaggaactgcgagtctttatgaaagagacaaaatatcctctatttggaggcctatatttcccccaagtctaatttttttaggtctaaagtagctagcatgtccttagttgagtgtgtccatgcacacacctgcacaatattgaatgtttatgtacaaaaatgcagaaatgagtcatctcagatctgtacatgcagagctacgcatctgtcaaatacacatgaggtggatcatggtgccatggcacctaacactgttgtaaaagcagttgtctgcttcttctttaaggtgaacacagagaatcaccttggaacagaagtctacatcttcccaaaagtgctcaaaggcaagcaaatgcctcttttttctcaggaggagtaaaagacttttggagtatgacgaaactgttcttcttggtatgggcacactgatctctggagaagaggtggagaaaagccataaggagccaaggattctgttgagaaaagagagactgatactccaaaccccttcaacattactagaaattcttctgtaccttgatacagttcagactgagaccatggacagcaaagaaaaatggtggaacattccatgagacagtggggaatttgagaaagaatccagctttacataagagactagaggtacatagaggggaactagtttcacacaggataaggctgaatctggaagtccttccagacatacacaccctagaacagaggtcctgccttgggaacactgggtgagcaaatgaactaacttaaaatatcgcaagcctaagacaaaccagaaaaataagtataacagtgtctagtactggaccactcagactgtccagttctctcttcatctgaggtctagaagcaggctgacccatggcctgagtaaactcctagtgctcttgaaaaatctggtgtggatactagagagaacttcagaagggaaaactgcttttctgttaatatgagcagacaggagttttagtagtaaattttaaaataagggatgtgatttctctttataccccagctgataaccagtacaaatgggtgcaaaattgcttacgcaaaagataaagatagaaccactttagtctaatttagataattttgctagtgggtttttatcaaaaagtgaaaaaaatagaagtgtaatgtggtgaaaggtgagcatccagatggtgaactgtggctcattttcctaatacatggaaaccagtgtgacttcaagtcaatgtcgtcaggaaaagctcatccctgggacagcaactaggaataatatgaatgggaatagtgctgagtctagaagaggcgtttaataattttacaggcctcaattgaggacagggttatagcagaagggattactatccactggattactaatcttgcaaaatcaagtgtacaaagcaagagtaaatatcatttttaaatggtgccataacatgtgcagtgcctttggtaaagacattttatcaagagttgtcattgagggacatgtctggcaaacagtttagctttatgtatttccttttaaacgcataacatgcgttcaatctttcctgagcacttaccatataaaaggccctttcctaggcacaaagattaccaaaagtaatgggaaattatccttgatcaaatagagtttacagtttttacacccagaatatacaagtgacactaatgtaaagtgaaatgtaattatcacaaaatgaatgaaaacaaatatatgcggcataggaaaggaagagatcacatgtgatcatgaatcaggaaagttcccatgcaggagaggtaaaatgatgatgatgatgatgatgatgatgctggtgctgccgctggtgatgattattaccaggcattcatgggattagaggccaattccagcagtgggaacaatttaaacagaagtgacgagttggttctgaggacagtaaagcttcaattaggctgtcccttcggcagatatctatcaagtacctaataaacaccaaacactgggttaaaggctgaggatggagacaagagcctcctagatctagcagaggagcaaaagataaacagaagataacataataggtaataactatactggattacaggtggggcttgcgagtaagagctctgtggtaagattgtccaggtagggaccagactccatcatctacaggctgtttattttaggcaagttagcctctcttccaatgtttttccttaactgtgaagtgagttaggaatgcacctgcctctccgggtaaatgagatggtacccgggaagcacttagcatagtgctgggcaccaagtaagtgcttaggaaatagtactgggaggcaggtatttgtttgcagttctctgtctgcctatctgatgtcaagaagaagatagtttcttagaaatagaattagggaagaatcagccaaacatattaacttttcaaaagtcattaatacatttgtatacattgtattcaagaaaatgcatcatttcccactctcataagcagtatatgaaaagtgtaccatgccccatagttaataaattcttttaaattttcactaatttggtaggtaaaatatgatatgtcattgttgttttaatttctataggattacagggaggctaaatatttttcatgttcattagtcacatatattttccctcacaaaaatagtcttccccagtgtggcaattcctcaaagacctaagaacagaagtaccattcaacccagcagttccattaccgaatatacacccaaaggaatataaatcattctattataaagacacatgtacacgtatgttcactgcagcactattcacaatagcaaacacatggaatcaacctaaatgctcatcaatgatagactggataaagaaaatgtggtatatatacagcatgggatactatgcagccatgaaaaggaatgagatcatgttcttggcaaggacatggatggagctggaagtggttatcctcagaaaactaatgcaggaacagaaaccaaataccacatgttctcacttataagtaggagctgaattatgagaacacatggacacactgggggaaataacacacactggggcctgtcaggggttggtcaggggaaagcatcaggaagaggagctaatggatgctgggcttaatccctaggtgatgggatgatctgtgcagcaaaccaccatggcacacgttcacctatgtaacaaacctgcacatgtacccttgaacttaaaataaaagttaaataataaaaaaacttcccattttataaattgggaaattctgaattttaggaattttggaaattttggtaacagaatttctctttgcacttaaagagtcaggaaagatatagtccttgaaaattactgaggagaacaaattaatataatcttacacgacagcacacatgtgctagttcatttcttatcatattttagggaaaaaacagaaataaacaagattaatactaaagcaagtgtgtgggatttggggagcgggaattagtggggattagagcggagacaagagaataagcagaaaacctttcagataaaaagatgaatataggtaacaaaacaaagaaaaaaggaaagacagtgagaggaacatgattatcaaagcaaggcaaagaaatggaggagaggagacaggagcccccaaaacttcttaaaattaatacatttattattttatagcctttcatttcctacctctgtacttagaaaagtgtagctttggctgtgctgcttgtgctgcacaatgagcaataatgcaggcaggagagattaataatacagcggggcagagcaaggggacactaatgggtgtccctaaggtgcaagttctcagagccaagggaatcccaagccctatcccattaacctagtggctccctctctgtcctgacctgaggtgaacaagaagaatctaagtaagaatcgcttctgaatatggatgtttcagcccacatcccctttggaatgtcccctcctggtactagaaacgcaagggccacacagaaaataaagagttaaaaatggggccaggaatgggcatgaattgacaccaaaagctgcttcctctcaccaacttcctggagaagcttcttttgctcaagagtgatcacctggccaaactctcatctacatcctgaccactcaatagtttccagactcctctagacctcttcttttccatgtcaatttcagtccacctcacctgtgccaggaatctgcaggaaaggcaagttgggaaaagggaaagaggcagaaggaagagttaaaggaggtcactatccacactgcactgaagtattccgcaatacccatcttcagaataaggacctgggaggaggcagggctgcagctgtggctgcaagatccacaatggctgggattcaaggcccctaaacaagagaaggtgcctaacgcttggtgcctttccatcactggctcctggagaacatgggtgatttctcttccaaagtcttaggattccttagcctttctcctttgttctccttccctaaagaacactgatattcagaatagatgcatcacatattaaaggtgctaagtatttgcctgcagctcacaagctacaggtgctcctccctcttcttgggcagtcttattggttttggtccaaacatcaactctgaggctagcacaatctctcctaaattttttacaatatctgtggtctactttttctcagtctctttccaatttcctatgtctgccttgattgtctgctatggttctacctaaaacaattgaaattcaaagtcaagccttaactggtttctacacaaaggagaaaaaaatctacctgttgcatccattctgtgagcttaataatcttgcagacttgggtagacccagggaaagaccgtgttgttgatagagtggactttccctatctccatggttgttccacacctctgacccgctcctttcttcctcaattgtcctcccattcttgaagattaaatatatggttttcttatttttatcttattcatgtaattctctatatcaagaacagcttctcccactctgaatcccctcaaactctcagcttctaccccaggtggatttttcaagttgtttcttctgaagaatgtattacactctctgaaaggtattctggagaacacaactttcttcgatcatattacatgatggtgcaaatcatataaaattagagaagttacaagttacagttccccataagcacggcacctttaacagccaaccagaacagaagccagccttagggaggggacagggtcttgtggctcctattctgccaggtatttgccctttaggtgctgacttacaagaaagtctgggggaataacagggcacccagaggcctcagagcagctgccatttactaactagtatagagagttccttatcttaacaactgcacaaccacatgagtgcttaccagctaaactttaatcaagtggctcatcaagaacgatcttacttgattccattttatttggccaaaaatctttttccatctctccccagtcttccttgttgtcaaatcacctgaaacccgtacttttaagtaatcctgtccctcacttgatcgttcattcttcgttttatattttggtccaagaccagtgctctgagattttttggtttctaggaaatcaatccattcttgatcaaatatttttctttaatttgaggaatttctttaattgagaaattaaccccttcaaatgacccagaattgcctctgtaggctttctaggttacagatataatatatcccataaccagcttcctttccttaacgcgacccaacccctgctctgtaacttgcattgttcctctttattttattttatttatttgagactgagtcttgttctgtcacccaggctggagtgcagtggtgcactctcactgcaacctccgcctcctggcttcaagtgcttctcctgcctcagcctcccaagtagctgggattacaggtgtgcaccaccacacccagctaatttttgtatttttagtagagacggagtttcaccacgttgtccaggctggtcttgaactcctgatctctggtgatccatctgcctcggcctcccaaagtgctgggattacaggtgtgagccactgtgcctggcctggtcctctttatctttatagatgttttttggttttgttttgtttttggtattttgccaaacagcaatccttaagaattaagctctagaatggcactatccaacagaaatataatgcaagccacacatgtaattttaaatagcctggtggatatattaaaataaataaaatgaaataggcaaacacattttaataatacatttcacttaatatatctaaaatattaattcaatgtgaaatcaatacaaaaattattaatgaggtaattcatgtgcttctgttcatataaaccctttaattcctagtgtgtattttgtgtttacaacacatcttagttcagactagccatatttcaagtgctcagttgctaaatgtggctcatggctaccatactgaacactgcagttagagccaaacgacctagtccagctactgatagctccaccacttcttagctgctcaagctcgggtaaataacctctctgtgcctcagttgccccatctgtcaaacggtaataatgatagaacacacgtcgcaagagtcttataatttagtgagaaggcacaattcctgaaacagaataaaacgtcaataaatgtcagctgttattatcaaatgatcattattttgctatttcttctcccaatactactatccattgttccaactttttattgaatatacaaaagaatgggtgtcaccatatcaggaaaattctctctccagaaactcatttctcagccactgctttttctcagttgcggaaataattacctagaagagtaccatacctttactaactagatgatacctttcctggcctagatggaccaaaagtaacacaaaagtaaattcacccaaccatagcccaagtataggacagtgataagcacaatttttatttacctattgtatgcatccttatttaccatagagctatttaaaaaaaaaaaagtctcttcatttacataagcaacttcaagctctgtgcctgaattctagccagtatttcatgaaggttcagccagagaaacacgttcattataatttaccctcccaaatattgcagaatgttatttgtgtggcctttaagcagttgtcatatccattcccaaccatggcttcatttcaaccacaaagaatagcagatgcactatgtttcccgaaattcctttaaaaacagtcttgtagattccaaaagaaatgggaacattaatgactggagagttgggaattaagggctggaggtagatagtgggaagggaatgtaaagaatccagtcttatcaagagccaaattgttaacagagagcaagggtttataacatgacgtggcaggagaatttacaaagatgaaagtcaaatgtcaagagtgagaaataatctaagaaccaaaatatttgcagaactagatagtatgacattacttgtggagaaaaaaatggattcttttcaaggcccagaaaaggtattgtaagggcaggttttgccaaaaaaaaaaaaaaaagcctttacagagatgtttgcatagttaagtggcatggtttataaaacttgcaaaaaagggaaaaaaatggaataaattttatagatgtagtatgaaactatattttatttttcttaaggagaaatattttctgatcacagatgtagaccaatattccagcaggacactcaacaaagttccttatgtagttctggtagaaaaaataaaaaaataacatggagagagatccctgatagataaccaaaggaaacttactgagtcctgttttattcagcattttaatcaataacttggggaagaatatttatactaattttaaaaatatgcacatggccagatggtagaaagaataatgaaggtgtcagttggcaagaatcaaacttcaaaaatacatgggtaggcacgaaagttgagatcaacataatcaaatgatattcgtctgggttaaatgtgaaaccaacttcataaagaacacatgagaatgtttggcttactttggatattagattattgtaaatttgggaaacccggctgtcaaacagctaatatgatcttaaactactttaataaaaagatagcataccaaacaagggagatgataattctattgtacttgactgtaagtggaacacactgatacactgataaactgatcattggtagcttgatcaagtttccagcatgaaatatctaaaaaatcatttaatttgaaagccagctaaagaaatttaagctgcttagtttgaagaagaaaatactcagacactgcctgagatgtataatgcacccagaggcaatcacatgaaaaaattgttaaaagtaactccaaagagtagaatatgaccctaaaaatgccaattatagcacagtagatttttgtctcagtataaggaaaatctcttgcaatctgaatggaatggattctcctcatgatccaggtgagttctctgccacaagaaatgttcgaagaaaaggagtcacggggtcagctgtcagggattccttcactcagtgagatgttgaactaaatgacccttaaggttccttctaagactcttaatatggtatttatgtagtaaaatataagcaaattgagtcagttctgtctgacatgataacatgaatgtgaggtcattacatacacatagccccatcacagagtatgtgtgtgattactagagacaaaccttagctcttctgtgtctgtagatcaattatgtcaacagagttatgggctagactttgagctagtgaggttgaacgtaaaacggtgtctgaatttattcaagttgatgttataggcttcactttttccataattagaaagcatatgtcagtcagcaggaaggctacagagaaaaatgaagagttttcagttctcctgacaatgggggtcacacaggggaaaggaaaaaaggtggccactcagaatacacacacacacacactctctctctctctccccgctccctctctctttatatatatatctctcttctgctaacagcccaagaccaggcttctgtgactctcaacatttctcagcagcttgtgagcaaatcttcctctttaatatccagatgatctttgccactgaggttaagaacagtaatatacttttgctcttctcaagggacaaatttcccagattgtaagataccatgcttgtctttgagttgaaactacaataaaatacagaaagaattctagattatctctcagctcttgttttaagatcaatgattcaacatggttctccttctgacagtaatgtaatgagacatgtttcttgcagatttgagaatataactctcactactttatagttctgctatgttcatccttcttaagctgtctttcactcaggcgaatcaaactttgagaggctctttgctctagacccagctcacccacatatttttatctccccatcacactccttgcctcatcttacctctgcaccaaaggtcaaagctgcagcccagcagtgggccagggactctgaaagtacagatatggaaagagtccacccactagcctatgcagatggggaaaatggatctatctagtcttcatgggaatggggatacactgtgtaaacacctggagctcttccacatttagaggatgccagtgacttaaagtcactgtccttccccccaaaaaacctagactttccaaagactgggaaatgttttaaatgttagtattaaaaaactataatttatacacttaatgtcaaatttaaataatataaaggtcaattttataatacactaccaaaaaatagcaaaaacttcactttactcaatgtctttactgaaaattcattcaactctcttccagatgaattcatctctttcgcaccccaatcaccaaggggcaggacactgaaaagacaaacacacacacacacaaaaataaaacacctcacacaccagggataaagaaaagagtaagttagtgatttcatgtacaacatctactttccgcttataggcaacaggattccctatgtaatgagttacagacattctttgatctccaaaatataggacaagagaattggtaacggaaataggttttgttttgttttgttttgttttttgaaaaccacagataggcagcagggtgaaatgccacctttgttccaagcaataggcagagttaggtgggtgttaacagagacatatttcaaaagctaaaatactgcagtaataagacgcgatgatcttggcataagaatctggggcacatggacaaagagagctgactgaagtctgtgaatacccagagaaattgatgaaggtctctgggctcttcaacgggataaaagtatgtttcattgtaatgaaggaaaaggaatgtcaaatgatcagaggaaaagagtgtgatgaaattcttttaaatagacaaagaggcctgctccaagcagcagaactctacaatctacctgctggccagacttggtgtagattagctgaggaactagaagaggctgagcctgagagttcagtgttttcagaatttgcaccttagcaggtcagggaaaggcaaaattgaatgtatacctaataaaaaaacatatcccggccgggcgcggtggctcatgcctgtaatcccagcactttgggaggccaaggcgggtggatcacgagttcaggagatcgagaccatcctgactaacatggtgaaaccccgtctctactaaaaactacaaaaaattagccgggcatggtggcaggcacctgtagtcccagctattcaggaggctgaggcaggagaatggcgtgaacctgggaggcggagcttgcagtgagccaagatcgcgccactgcactccagcctgggcaacagagtgagacttcgcctcaaaaaaaaaaaaaaaaaaaaaaaaaaaaaaaaaaaatccctttgctgtcatagctatctatgtaggtgtctgtctccctgctaaataggaagcttcctgaagtcaggaacaacctagaggagtgactaaaatacggcaagtgctgaataagtatttgttatgtgggcacaatagctcaatttgaggagtccccacatgacaatttgagctgtccccaggtgacagaatttcaactgtccccaggtgatagctgtcccactaatgatggcctccctgtgtccacctttttgcaatgtgacttcgctgtctccccattgagagctatagtcaatttccacccccctgcccccttgaaatgagctggcctaaagactcatcttggccaatatgatgtgatagaagtgtcactgtgctagttcccagcttaggcctccagaggctttgcatacttctgctttctcccttggaagcctgccatgataggagaataagtctggctagcctgctggaagatgagagaccacatggctaagagcccagctgtcccaactgaggttatcctggaccagcctgtaaccagccaacactgaaacatggggcaacccaagcaggatgagcaaagaagcctaccaaccaaagctgaccacagatgcaggagtgagtccagttgagactagaggaactatccagttgactgctaaccttatgagaaacgagacatggttgttattttaagccagtaagttttgtatatttcattatataacaatagcaaactaacacaccccacaaaatgttgcttttatgttttatgttcttcattactaaccttgtttttaaatgtttatgatctgttttagcttcgcaattcaattcaaaagaaaaagccaaaggaatccttatcattaattcaattataacatgtctgcatgtgtcatttccctgttcccactacttgctactacttaataaattcctcatttatttcttaatttttccattaaaatcagtccctagatgttcccctggcatccatccttgttttaaccccatctgcataatatgtaagggttatcttgataaaacatgggtgtgatcatatcactcccctccttaaaaagtttagacctttcctatcacgtacagaatgaagtgtgaactactcagatggccaattccatctctgacatttttgcccaaacacccttttccaggctggtctcacaccacaactcccacatgccttatgtcccagccaccccagtctgcctccaccctttaccaagcatgtctcctactctctcaccttcatatttttattcagcttgtttcatgtgcttgcaatcactcaccaaagtctcattcaaagcctccaattctaaaaaggtatcctaattctccactgtatcttcatgtaatgaaaagaatgtaataacaccaacgacaatattaagtgtgtactatgagctatcactctgctaagcactctatgtgcattctcttttaatcatcacatcaatcttgtgatgtaacaaatatagcaacagataacaaaatagttatgattactattttccatatgtaatatatgggcaactgagactcaaaatgttaatccgttgtcaaatatctactaagaggcagagctaaaatttgaatctaagactctaggagccagtgtgctgtgttaagtaatgttttcatttgaactttccatatttatggaaataaactaaactaggccacaaagtagttaaatgacttgcccaaggtcacagagtcaccagcagtactacatcatgaatcaaaatattttgattccctcaatcttatgctaattttctgctgcccaggaaaggataattgctgactggtctctccagtaaagcttgagagttttgcctttgcccactttttcagtaaagaacgcctcgactaaactaagcaggtacatttcattttctcctactgctttaatcatccatagttattcagcaaagggtcccaaggctagagggagaaattaagcctaaaaccaaattaaaataatttggggtttaatttgattcaaatgtcagaaaaattccacccagtaaccctgttaatatacaactgaactaaatgtcctatatacccaattgtattcaattttgctgggaccaccgatgccttaaacatgttaatctcattctcattctatcctactttatgcacttgtctctcaaagagtgccacatagctgaacttatttgcttttcaagaactgcacgccattttaattacataaaatgtcaaccaaggcagtcctgagtcctggcggacacacttacatacttaagaaagcagacctgccattggccgtggtgatcagggtccggaggctaggggctgagaaaggcctggtgaaccaggaatataccagatttttcccacaggtatcagggctgaggggaaaaaaaaaaggaaaagaaaaaatccctgattgaattgaaacccaggtgaaccatgtaagcttggaaatagctcttttacaaactcaaaggggaagaaagggaaactgacacagcttgttttgccgctgtgcctgttgtccactccctttctttgtccatgcaggctgcgctgcaggtgggggctgggagggagcaggtaaaagggcccgttcaagagtgcctagtcctcccggtttgagactctgcacaaaggagggacaataaatacaggcttcaaaggagaaaaaaaaaaagtatgtagcacgatccacctcctccaaggaacctttgatagacagttcttacctgctgctttctgttcagcttctacctcccaaaaccacaattcatctaagaaatatctttttaaaattgttttttcttaaggcctattaaaataggcataactgttaactagatgaaatgcaggatcatgtctaacctaggctaggagaagtggccactgaatattatttgaaaagctgtcttaagtctatgagaagcccctgcataaaagaagatgaacttcagtggaattccccaactcttcagccattcattgcttatcggacacgtatcatcagaaaaggtgaagattctatttcatatagtctaggagacagaaaggaaatggcaagtacaatgggacttggctgctaccaatggtctgaaatagaaaaagtactattcaaattctaggactatacctgccagaaacatctgcattatttcaggtgacttaacccccagcgcctctccctgtgcaatgttatagcttattagcacttctgcaaaagggcaagccgtaccagagaactgaaacacaaagatttgccaattcagctagaaaaagatctcatgggcggaagaaaaaaagcaaggaatttaagtgttcagaaaatatgcaaattatctaaggatttcatacatcctattatggtcgtttaagcctgtaactaagattccaatccatgtaacaaactcagagacaattgtgaagatacaatttaggccagtgggagccatctttcatggaacctacatttttaagaataaagatcccaacttcttcatctcactgattaggctgatcaatccccaatccataaatacatcacattccaaaaattcatccttaagctagttatttagaaatccaaaagcattctcccattgatccaatgtaataaatggggattgcaaccccagaccagcctgcaaataccaacttatctcaaatacaccaggaagattcttcatagcagccccacgcctctctggggcataagccaatggagccctcgtgaaccttaagaccttttgggactgatatcctgtcatctcagaggcaagggaagaggaaggaaggataaaatatcaggttccatctgaatagcttatgtggcaggtagagggaggctcaagtgggagaggtctaaatatataatttttctcccaaagtcaggtagatattagaagagagattatgtgtgatgaagctttccactttgttccaaagaaaagatgttgaattgcggggacagaactggactctcagaacattagaagggccactatagggaacacatatagtattcaacagaatggactaagtttccagcaaatataaccattaaaataacacatttctctcatttctactgattataaccattactgatactgtcaatcagagaaaaattataaaaatctaggcataaagaccttattaatatattcaactcttaccaagcatttgctagaaccatagaatgcttgctcacaagagagccttggaagtcagccacccaacctcgttttaaaaatgaggttaccaagggaaggaaaaattaagtggtttcctgttacttagacacagaaatcacctggtgcccactgggaaaacaatttcacgtgcctcttatataaactttggtttcccttctttccttttcgaggaacccttaatttctgtgtattgatgtttcatgtgacagttaaacctgcttgcagccaaaatgattgttttgctgagggaaggtgttaagtttcagcccaagcatctccctttgaactctggggactttgctagaactatctttgctgctaggagagaccacttccctttttctccaaggaagacctgccttggcctgagcatcattaccttccctctgcactggctgactgcaagcaagtggaacatgaaactggcaatggagatacaaagctccggcaaatgtcgaactcacttaatttgctgaccatccgattaatggctggtcaccacatttcaagtcagctctagctaaacctctggagcttcttgccaaaggcttcttaaagagtcctggttgttgttttttttcctatacacacttaaaaacctcattaaacaagagagaatgtttttaaaacagtcaaatcatgttttatccatagacttgcatgtcagaggttataaactcttatattcaacaacagcctctgtaggatccatgccagagtatcagaataaaatgaaaaaccactggcaacggtgcaataatggtatcccattaacaactgagatcttaagaggcaataactgcaaaagcatgttaccattaaactaagtgcatgtgccttccacattccagcaaaaaggtttcagaagatggctgcagcttaaaggacttggatgagggaaaaggatgtttctagtttaggatgccccactcccctgcatcccctgggcaagttttccttaaatcacaagagaccctaaaaggaagactattttgatggcaaataccctagtgtaagaactgtcagtccaagatcagtttttttttagtcgctctgaatatttggagaaattatctaagcactactagccttagttttttcagctataaactggtgataataattatgctcatgtaagaattgttggaaggattaagcgattcagggctatgcatcagagttgggtaaagtgaggagtataagtaagtgctcaatatatgttacttgctatttttttaagaaaacctaattaaatagaatgtcttgcagagtcccccataaccactgatatcaattgaaattaacttgctgttactatcacccagaagtaaaattgggagacactgtgagtggcagaagcaatcttttgctcctctagcgtctttactaaaatgtgcaagggccccagaacatgcatgaccatagaggtgaggtgaattggaagtagatttttacgttacttagcttggcatgagttgaaagcatccttactcttcctacatagcccctgatacttgaggtatgagctgagaaatcctcctcctttgagacaactgctcactttctcagttctgatctcccatggaactgagggatgcaaatatccttcagtacaggcctggattaatcctctcctctcctggcctccatctgcctatccatcacagacgcagcccctctgtagtaaatctctaagccttcggcctgcaggaccttggtccctctttcaatatcactgcaggaacctccctccttcacagcaccccatctttctgcactgaccttccactctcctgtgtcctctcatcccctcccatcctggctcttcagactttcctgtcccacacatccccaaacccttccaatctgagtcacctctcttattatctttactttccttgaatgtgtagacacatttaatagaaacaaagaagcttaatttttaaaaacattgttccctaatcataaatccacctgacccagatgaaaatgttttcacttccccttttgagagacccaaatagatatgtacaagttaaacacagtgacatgaggtctgccgaggtccctcattatattttccataacttttggggtaattgcattttataatagtcatctcccatgaatcctctgtggagaatcacttcttttctttcagttggtttgaaggggcatggtcactgttcattggtgctgagtagtgattttataaaatacacagtaggaacttcagacttagaaaggaggcccactcttgttgatgaagctgttaaagtgaaattaggaccattatgaggacctatgccaggactgaaagcaagacctaaggaaggcagtttggtttgggcaagattgaggttgaaataaggacccagagagcggggccaagagtgagaagcagaacaagtccagaggctgctgttccagtgggagtgacgaggctggaacccttccctgcagacacagaactagggtccagaagggacacaggggtcacagcctgtgcttggcatcagggaaaggagaaggtggcttggggcagccctcagggtggccttcacctaattcagcataggtcataatatcatagctacagaaaaaaatgacagtacacagagaattaaggagctgaagtagaatatgtttatgacagcagggttaacattccatgtcctggcgaggcgcggtggctcacacttgtaatcccagcactttgggaggcaaaggcgggcggatcatgaggtcaggagatcgagaccatggtgaaaccccgtctctactaaaaatacaaaaaaattaactgggtgtggtggcgggcgcctgtagcccagctactcggagaggctgaggcaggagaatggcatgaacccgggaggcggagcttgcagtgagccgagattgcgccactgcactccagcctgggtgacagagcgagactctgtctcaaaaaaaaaaataaaaaaaaaaaattccatgtcatgtgaaaggcttacagaatttttaatgacagaaagaaccacagaatgcaccatggacagtatgttgcactctgtttcttattggggtacctataattttcctacaatattctgagttaaccacatgaataaacacctctattagctttttcactttctcaatagccttatgaggtaggaattttttaaattaactaaataattctttattaatatgtattatatgtacatattttaagggtacaggtgatacattcatataatgaaatcaaggtaattagtgtatccatcacatttaatatttatctcttctttaagctaagaacatttgaattattctcttgtagttattttgaaatctgcaaatggttagtgttaaccgtagtcaccctgctgatctatcgaacatcaggtctcatttcttctttttaattagatatttgtacccaataattatcttctctttgtactccctctcccctacccttcccggcctctggtcacaactaatctattctctagcttcatgaaatccactttttagctcccatagatggatgagaacacgccatattcgtctttctgtgcttcgttgtttcacttaacataagcctcaaatgtctgccgtgactgatggcagcatctcaagggcagccactggccattggccttggacctatgaagggcatgccccagcttaagccagtgccagcattttgagtgcttgggcatgtctaagaaactaaagggatgggctctgcagaagtctattttcatgagaaacagaggagctccctagaggagaacttacttaaaggaaaggaaggaatcaaacaagctcaatcaattaacagagctatagtcataggatgagagaagcggtttagaaaccaccatgatggctatcccttgaagctctcccagcctggcctgtgggtcctcagggaataagaaaggagaagatgtaagtaaaaaccaaaggagctttttcattaaaacctttaggagatattgtgacatgaccatccagctttggtgcctaacataattggggataagaatctctctcaaatacttcaccccagaccctgttgaagctttaacttcatgaaggcttcaggctccctgaggaaggtgactagtgggaaactagtatccacaggggtctgtgctctcaatggaagaagaccgcagggtctgaaagaggccatggtgcaaggcagatgctgtggcacctgacagaagcagcagccatgcctaacacatatagtggtccccactgcaattagaacaggaaacattggcagcacccaggaaaaaccaggaaacacacaaaaagtggcaggcattctcagcagatattgcacctgaactgtctgtgaatctgtaataggccctcctgagaactccccacagcacatcagggaatagtgattttgtggaggattgtggtcttaaatgagtaggaagaagcaagaatcaatgagatctggactcttagtaatattatacaatcacaaagtggtgcagcctggggaagtctgtgttacttgtaatatttccaactgcatttgtcacgtctgtaattcagatgaaccccaaagcaagtctgaatgtgctggataaagttattcaactcagggcaggcacagtggctcacgcctgtaatcccagcactttgggaggccgaggcgagcagatggcatgaggccaggagctcgaggccaggagctcgagaccagcctggccaacatggtgaaacccagtctctactaaagatccaaaaattagccaggagtggtggtgcatacctatagtcccatctactcgggaggctgaagcttgagaatctcttgaacctcagaggcggaggttgcagtgagctgagattgtgccactgcactccaacctgggcaacaaagtgagactctgtctcaaaaaaaaaaaaacgttattcaactcacaaatccttagttctcaagaaaatttcaggatgtgcttatcctctaaccaaagatgtgttcagtacccttcctcctttctgaacagaatgaagtcatcagccctaatggccatgccaattgtgattctgtttttctcctacttttctttggcctatgattcctaattcgaatccactcctcatcagttcccaaggggctctagtaacctatccttagcacttttcccactggttacagtttagaaaggcctttctggctattgctattccagctgctttctccatattttgaccccttatctgaatggtgtgttccagggggattcttcacactctgtcttagcctctgagcacaatcagtaagtcatatcttcaaaatcagactttttggaagaaggaagtgggagagggttaggtttttaaatcctttaaaatctgtgtcttcaagtccttcatggaagtggataaaaagggcctagtgcagtggctcacacctgtaatcccagcactttgggaggccaagacaggcagattgcttaagctcaggagttagagaccagcctgggcaacatggcaaaatcccatctctacaaaaaaaaaaaaaaaaaaaaaaatacaaaaattatccaggtgtcgtaacatgtgcctgtgggaggctgagacaggaggatcgcttgagcttgggaggtggaggttgtagtgagttgagatcacttcattgcaccactgcagcctgggcaatagtgtgagactctgtctcaaaaaaaaaaaaaaaagaaaaagaaaagaaaaaaagaaaaagaaaaatcaagaaaaagaaagcataagaaaagttaaagcaaaggaaagcagagtagtttccccacgtctacattcttaagtcagaaccacctccattcctatggcaagatgccagtattctccagcagcagatccatttcaatgcatttgcaaaggcactgctctactaaattaaatgtccaactagaatgagctatcaccagaacacactatcatgcctcagctacttccattactgtgaaccactccccactaacctcccccccggacccgaaatacccaagaggtcacaaagatccagtggcatccaagaaaataaaatagttttacatcaatatgtctccagcaagaaatccctctacagttgtctgatagagccatcatttttctcatgttcaagtcaattgagtaatcagaagaaatgagactaaaaataaataacgttagccatggaatgggaagatataactcagcaaaatgctggcaagtgcttctctactcgccaagcctcagaatgcacaatgcccctttctgttcagccatgacaatctaattcaggttttgtcctcccaggaggtgatcagtgagtccagatggacaccaagctacctcattgtcctgggcatcgaagccagactgcactgcaggtgtgtgctgaaattcagttccacttttctattgccagcaagcctcaccatgagaggagctgccacatgcctagagccagctcctgggatggctggataaggccagagccctatgattctttgggccattctgatgttttgagacttaaaggagcaattaaagcccagctctgctcactcatgagaattcagaatgactaggatacataatcatgacataattagaaccaaacaagaaaagtttaacaagaacaaatgagcttagtaaaaataagctgtgtccatctatattgggtagagaaaaaatatctaacaacatttagtggataataagctaactgagttaatactataagatagaaaaaaagttaacacatcagggtatctaaattttaggtggcaaggtagatataagaaggcagttattaaaacatggctgagatcttttctagagaaggaactcaggttgatgcagtggcgaaaaaaaaaaacgttttacaattggaagaactgaatttgatcttgccatgcactttcactatgctgcttggcttaactctgaacttccgttttctcacctgtaagatgggcatattgataatgcataattttattgttgcatatgttgtaagaattcaactagctaatgcatagaaataccatttgacccagcgatcccattactgggtatacacccaaaggattataaatcacactacataaagacacgtgcatatgtatgtttattgcagcactgttcacaatagcaaagacttggaaccaacccaaatgtccgtcaatgatagcctggattaagaaaatgtggcgcatatacaccatggaatactatgcagtcataaaaaaggatgagttcacgtcctttgtagggacatggatgaagctggaaaccatcattctgagcaaactatcacaaggacagaaaaccaaacatcacgtgttctaactcataggtgggaattgaacaatgagaacacgtggacaaagggcggggaacatcacacaccagggcctgtcgtggggtgaggggatgggggagggataacattaggagaaaaacctaatgtaaatgacgagttaatgggtgaagcaaaccaacacagcacatatatacatatgtaacaaacctgcacgttgtacacatgtaccctagaacttaaagtataattaaaaaaaaaaaaaaagaaacagctttccagtgtatggtatgcaataagagttcaacacacattggctatgaatggaacatccgtttctgatataaccaaagaagcataaacgaaaatgtagaaggtttttggagaacaccacacatttttaatgttgtaaaatatggcctctcctgaaaacttgaccaattgcagacccacaaagctgaggatcagaccctctgattttgggccccaaccccagtctctgaggctccaactgggtcatcagccagactccttggatatctttctttttagtctcactttgtgagtcagggggaagaaggccagagggcagcataattgggaccgcaaggcacaggcatgatcaactatagcttgggtttacaaatcaccagacaagcctttccccaattcagagaagcttttagggccatttgaaatggaaatgtccattaaccttgaaagcagacaatgagtgatgcaaatattaaaccatcttataaaggaaaaagacaatgatcaactcatttaaaaaacctttgtgagataaacagactttatgctgcatatctagtgtcttccatctggccagcgaaacctctccatccatcactctaacacttgatctgccattcccctgcaggcttgggagcatgaactgaaagacctgaaagtccatccaatccaaacttctcattttgacagatgggaaattgagacctaaagaaattagatgttttctaagaacacaaattcggtggcaaaattggtaccagatcctagttttcctaattacctgtcatgcctgccttgttcattctcacctcaaagattttatttgacaaacaatatgattcctctacctctatctatttagattgtgagtccttaaaggaggctaaattatccagcttttgtatttctcactcaaagaaataaatagatgattaaaaatactgttttagtccattcaagctgctataacaaaatacccattgactgggtaacttacaaggaacagaaatttatttctcacagttctggaggcttggaagtccaagatcaaaatactagcagaatcaatgtcttatgagagcccatttcctggtttacagatgatgccttcctcacatgatggaaggggcaaaagttctctcttgggtctgttttataaggtcccactcatgaagactctgcccccatgacctaatcacctcccaaattccccaccccctaatacatcatcaccttgggggttaggatttcaacatatgaattttgaggggccacaaacattcagacaatagcaaatactataagttgcacttttactaaaatgataatggaaagtagagaaatctgttcccatttgggcagggattggtttattctgtttcactcacatcagacctgcttatagttttgaagaatccctaatggttctcagaatgtgggtaggacctgctttgccattttcaaaaaggtctactttcatgcaaataggtaggaaactacatactgttttgactaatgtaacaaccaactggtctccatttccttataggattaaaagctattaaataaacaaaattcagcaagagtttcatgatctatgaggtggaggtaatattcttgtttgatggacttaaaactctataaacagactttacataatctttatccttagaaatcttataaaaaagtgttgtctaaattggatggttcagctgttctccctcacgaaagcacaggctggatagaagcccttctgtgatcctttctctacccacttgctttctgctcttattacagtgatattctagtaatatttaattctctaccatcacacatctcctacctataatcacttgcagacttcagtttgtaagaagactttctacctgctcaaagtcaatctttaagtcacaactatgattctgaagcctaagattctgtatttctaacaagtcccagataacattgatgctgctggcctttaggccatattttgaatagcaaaactctagaatgtatcccatgatcaactatatggatccattagaaccattcctgacccattctccttcctcagtaacctctctactaaaatactaaaatgtttgaaatggcttttgtgtgtttatttaaaaatgaacatatgattgtagagttatgaaacaaggaaatagtatcattcattcatttactaaaaaaaaaaaagtcagtgttgcaatgcatcataccagcccctagggattcaattatgaataacacacaatcatatttgtagttagatgtcttggtcccacaactaactagctcattaaccttggataaaccatctaatcagtttctgctaattttttcttacataaaatgaagataacaatgttcaccatatagggtagtatgagtacaatatagaattatgtatgtaaacatacaacataccccaaaatatactataaaatgtttgatatgcttattatcatatgtatttattatttgttcaggttcctctcttatattgtaatctgccttaagataacaaatgacaccacctgtatcccttccaccaaaactaagcatttaaaatacttctttacactccacagaatttaaattctttttcattaaatgtctaatctcttttattcccacgcttggacaatcagttcattctagaacatttcaacaggaaaaaaaccaaactagatggatcttagaacatgtcctcatgacgatctctgttctgaagggtctgtcattccagcattgaaggcctccttacattcaaaaaggtgcctcctttccctgttgctcttttcttccattgatctgagaacatttcccacaaccactagtattcaacatatattcattgaatgaattaattaatgttagtgtttgacatttgttaaatccaagaaaatactgacaagtttgggtactgggactgcaatttgtaggcatctttccttcacgaacaatttcactgctctgggtcagagcaaccacccattgcatcccctggaagctgttctgaggcctttattttgtggcttggaagtgcttattatttgtacacctgctccttaagaatcatggccactgatgtaactgacactaattagcccttccccctgcaggtccccacacagggccaaaggctaaataggactaaacacattctgcctctcagagtggcaaaggatgggtgacatgttttggcagaaggtggagaggaattttaaactttccttgtggttccctcagtctctttcgcccttgtattccactgtgctcacatttctagggactgtcaatctggcaccaaatccacttaaggctgagacacagtcacccatgaggctgagaccaaatactttcatatcacaggacacctgaaagattgctagacctgatctcagggtagaaccccagggcatctcttgcccattgccttctccaggtgctgttcctgctgccgccacagacaagattaacaagaaggttatatttaaacttccaagaggcactgctgtgccattatgggtctatttaaaatcctccgggcagctgcagtacataataacaaatcagcaggagagagggggggaaaggaggagcagggaaggaggactgggggtggtcaggagcatggtggattgtttctgagaaaaattgactgtcaaaagatggcagggggtacaggcaagttaaggatgccacccagggtgagagtgagggagagaatgcatcaggagaacctgctaggcagggcagggagagaactcaggctcctaatatgaagatctgccagacctaaaaccttgctgcctgcctggaagaaaccgctccatagtactctatttctcccaggggactctactgaacaataccagccattcttcagtgttgatgaaagatcagcaccagaatagaaagagctctaataatgggaacacaaagcagctccctcaaacccaaccgatgtgtgccattttcctcctggaatcactgataattcaccccatgggaggactatgtcacattcccttaaagaccattctctagtgcagcagtcttagaacctgatgactaacctacagctgtgctcaattttgacgttaaggacccatcccagtctctggtgtctttgctaagtttgggcatagtgtttcttagcctctacttgccttctcctatcaaagctctgtgggtactctggaacatttacaatcttccctcagttgtatagcacaatcacattcattttcatctcccagcctcttcttcactgacagtgtttgttaaacttagtttaactgacattatccaaactcctgaccatttttatcactctttgctaaagtggcttcatagttattaatgtctctcctgattattttctgcatgcacaaatttacttaaatttggttattaaccacggtttaaatctccattaattgtctaaactgtcaccccttggggcttccatatagtatcaacatctctgaactcacaagcacagaaattatgagacaaatgaacatggcatccttgttcagcatactgttacagtgaaaataatagtctttcattgcctgattaattttgcttctatggaggaccaaactggatgtcacaggctaacacatttactatgaatgtacgtcatgatttggatgttcacaatgatctaattaaccaaatacgtgtcaaaaattcactttgtattgtatagagatgtcttaaatgtcatgctatgctatattctgatgtaaatacataagaaaatgatataaatgatgtaagatgctaggtctatatatgttatttacctgaaaagaagattgtagtagatcagcaagtattaacagtttatacaaattaagaataaattcctcaaggggatttatcttctctttcttttgtttctggttgaatgcctaatacgccggagatttataaaactgtctgtccctactgcaggaacagtaggcaaacaatacgtacaatttgtaataaaccaaaacctgccatatcaacatatacttattgattgtaaatactgacttaaaattaagttctatataacgaggacagtacgtgatcattaagcgcactatgtggaatgtattgtgcaaatgttacaaacatacattggctgtgtaaaacactctgccacatgttcagatcacagtttgtgacccctatataaaaaactgatcaatgatttattatctagtgtcaattccctttcttccattttttcatccctatatctttctctacaactattaggagctcaaaagataagaatttcaaagaaagagagcaagaagtcaagagagtacatctaggaggtacaacaccacaggcccagaacagagaaggacagagaaacttgtactgtcccagtggggcctgtagaaatggctttaccatctaatatgaaaacaaagtcttggccaaacaaaaatgaccttctcaataagaaatacagcaaggacccttgattgatactccaaagaattccttccgggtgaggtgatcaatgaggaaatcagacataacgatcctaaggtgtcactcaggaaaaatcttgacagaaccaaagaaaagcagccctgtgtcaaggagctgtccagcattcagccttcatctgaacttttggagaccactcagctcatttctgtcttcatttactcactgtcttacatgtcatccatctcttgttggactaagcacttcagtctgttccctgggaactgctctgagctctatacacttggtttagacaagacgagttacctacactccagtgacttcactgtctgggtgagcagacagggacacttaccttggttcaaccttccttctgtttgtttggtacccctccattcacgcacccaccagatgcttactgagtccttcttccgtgcttgggtgctcaagatacaaaaaagaataacatataatcctgccctgaaggagtctgaagtctagccaaataaacaaatgtgaacaaagaataatactttactaaatgaaatcatgaagatagacacggggaaaagacagcttccatttgaaaataccaaccagaataacatactattcacaaaggcaaaattaaaatcaagtggctaataagtatatttgaaaagttcaacttcactagtaaatcaactaaatagaaatttaagcacaaattttttttccatattgcaaaggcgggggaagtggatattctcatacactattgatcaacacacatactagtttaaaattaatggagagtaatttgataataaatattcaaagccacaagatgttggtactatttgaccaagtaagtccagttctgaaaatttatgctgaagaaataatttaggatagacaaaaagatttatctacaaggatgtccatcattctattatttgtaaaatctcccaatttaaaaataatataaaatactgaatagagaattggttaaattgcagaattccatgaagccataagaaattatgtagaaagatgtttcttgatgggaaaggataatcatatatgaatacaaataaatttaaattttttacataaatagaaaaggactaatacaaaacagtatgtgcaatatgactttatttttgttttatatattgcacattgagagatgttcagaatgctaactactatctagtgagattaactatctggttaattttttccttgtcttctagtttttctcaaatgttcatgcattgcttttgtaacaagaaaaattattaaagtgatacagttaactcgggaacacacaggtttgaactgtgcagggtccacttacacacagattttcttccacttctgccactcctgaaacagcaagaacgacctcttctcttcctcctcctcctcagcctactcaatttgagtatgacatgatgaagacctctatgattatccacttccacttaatgaatagtaaatgtattttctcttccttataattttcttaataacattttgttttcagtagcttactttattgtagggatacagtataataatgtatgcagcatacaaaatatatgctaattgactgtttctgttatcagcaaggcttccagtaaacagtaggctgttagtagttaagttttggggagtcaaaagttacacacagattttttactgtgtgggaggttggttcccctaacccccacattgttcaagggtcaactgtacttaactttaacagaaaataaagtgcctgtcacatgccaggtactgggctgtgttctgtgcatgcaagatctgctattcacagcactaccaagtattactgagatgaaatgactcagctagtccagacaactagtacctatggagattaaaagttagttctaaaactcctgttctccttgccatctaactagtctataatatttgtttcctagaatttcattttttaaaaatctatgctactataatgttaaaaaagaagttttccatataaatcaaaccaaaatactctgtaaaccaacgtaaaaactgtaataaaatttaggggactgtgaataggcacagaaatacttttaaaaggcttctttcatgttctatttgaacacacagcaaaataccctaaaccctatggtgagatgggaaggtgatggggacaacggagagccaaaaatgaagcaacacacatgtggaaacaacaattcacaaggggttacccacagccaagtctgagctgatgtagcgagtcaacccagttgggcatttgcctttctgcctgtgagcctgcagttctgtttgtcccaaccagccattttatgcccctctgtttctatttcaagtacaggacaaagaatgatattgttctcaatatgaattgccacttcactaagtactttattcaccatttacccattttcgtctttctctgaacttgccaaattatatcttttcaccagaatatgcattcctgggtgatcaagtataaacctgccaacttttgcctctcctttctgatctcactgtaccttgtcatttctgcagctctcttttttttttttgttagtgagatattatttttagataagaaatcttttaaatgctcatttaatcctctgtggactgtttttttttttcaccgtacactgcattacttacattctattaaattgattttcactctctgctcttctcacttcccagggagatcagtggtttgttagtgtttcagattgttattcctaaagtttttactttcatatagtcttatgccttttaggttctccacaatcatttagggttcactatgatcaaccccatctatttttagtcctgtctcttccatctgttcaatgcaaatccaaacataagatatctgaaccccttcatttttaaaaattataacactttcatatttggttgtcctggtccctccaccttgactgcatcccctttgccttgtcagtgcccaagggaacctgtagaattcaaataacattttctccagtgtgctttctctggtcacactaattaaaacttctgatttcctatataacacttagtttttacagttcctgccgtgtttctcatagagatttatattatatacatttggttatttcttgtctcctccaatacattctaaactccatgaggtctagaagagtgtcttgtagcaataatgccttgcccataataggcacttactaagtattttttgaatgaatgggaaaatgaaccaaccaggtttctctaacatcctgctcttgagggcttgggttagtgtgcacagtggcatcttgatccatgtatacctcactgtgctaacccagggttcatggatttactggtcattaagttttcccctgtcatattcgcaatacacagacatacacaaagccttgttgcttttactattagtttcagtctggtctagccttgatttaattgtccccattttatttagaagtcaatttatttcattttttagtatttatttagtactttatgtttgaaaagagcttttcaatcattgattagttattcttctgtgaagtagatctgtatagtcatctctattttacaattaagaaaccaaagcgcagaaaggtgcaatgactcactgaggttaaagacaaagttaataataaaacctatagctacctagcttcttgcccacagattaacctacctcaccgtatttcctagcagaaaccagagttcatggatccgcataagataatctaaacaaagttatatctagaaaagcctgaaggtcaaaatttcaaatagttatccaaaactacaagatggtattgttcttttccttgaaagtggtgttcttcagtgctaactacagcacaagaaaaaaagaagattcttaaatccccatggggaggtgtttcatctttctaagaaacaataagctggcaggctattattatttatgttattaaaagtcaacaaatattgaattcaaattatttgcatttatttattaaatgacaaataaaaattgtatgtatttatagtgtactacatgatgttttgatatatgcttacattgtggaatgtctaaatcaagctaattgacatatacattaccacacatacttatcatttttctgtgtggtgaaaacatttaaaatctgctcttaacaattttcaagtatataatacattgttattaactatagtcaccatcttgtacagtaaatctcctgaatttattcacgtggtctaactggaattttgtatcctttgatcaacataccccaattccttcaactcccaatggtaaccaccatcctattgtctgcttctatgagttcaactggttttagatttcatatataagtgagatcatacagtgtttgtctttctgtatcttgcttacttcacttagcaaaatgtcctccagattcatccatgttattgtaaatgacacaacttccttcttttttaagactgaatagtattccattgtatatacacaccacattttctttatgtgttcatcaactgatggacacttaggttgactccatatcttggctactgtgaataatgatgcaatgaacatgggagtcagctttttctgatatactggttgcatttcctttgagatgcccaaaagtgggattgctggggtcatttggtaattctattcttagtttcttgaggaacctccaaattgttttccataatgatttaataatttacattctcacccacggtgtgcaagttatgttctcatccatctccccatcaacacttgttatctcttgtatttttcataatagccattttgacagctatgaggtgatatcacattgtgattctgatttgcatttccctgatgattagtgatgttgagcatttttccatatacctgttggctttttgtatgtcttcctttgagaaatgtctttttgggtctgttgcccattttaagtcaggttattagttttcttgctattgagtttcttgagttatatatttttaatattaacctttattagatgtatgatttgcaaacattttctccgattctgtaggtttgtctcttcactctgttgcttgtttcctttgctgtgcagatactctctagtttgatgcaatcccatttgtctatttttacttgtgttgctcatgctttggggatcatatttttaaaaaatctttgcccaaatcagtgttataaagctctttcccattgttttccctagtattttttacagtttctggtcttatgtttaagtctttaatccatttgatttgatttttatatatgagataagggttaaaaaatccatttaaattctaatttgagtaatatagtctgccacttaaaattactcaaagtgccatgacagggcaagactccatctcaaaaaaaaaaaattactcacagtgccttgtaaattataacactttatataaacataaggtccatcacaatgttactgtttattttcctgcaaatctcattagattgcttagccatttcgtcttgaaattttgcttggtgttaatgaacagggtgcaagttctttaatgtttttgagaatgctttatgaaaaaaaggtggttggattagacgatttctatggtgaccttctgcccaaacctgccacggctgtatgagtctaagtgacaaccgtgctgtgattctcctgatggaaatatttcaggactgtgagtagtcgctgtgtggacaattgcataaagtccttcacaccacttcatataagagggcctagaaaaattcccatgactttgtgcactagctcactcgttcacatttcacttcacataatgcccttctccttctcacctccctgcatctctctgaccacattcaccttgcctcccctcttctagtaccagtaagtaagctttcctaggcaaaggcagaatctcaccacagcgaaatttgcctcaattgcaatcagcaacagagagggaaaaactgtccaaattaagctgcttgattacggaaattaatcttgtcatttagcgtccctgttctgcagaacagggcctttgattagcctccttgtttcagaatattacaagcagacgtttattaagcagaaggcttttttttttttttttttttttttttgtagtcaggcaagtcacaggaaaagtaaaggtagcaaggggcttcttaaaaaagggcaccaagtcaaggactgtcagtctgcttctgagtccgtctcacagagcaggactgtcatagaatcaggaaccttaaccaacccacccagcttaggatggctcctctgaagggaagtttaagcagcagtagaaagataatccataatctgttatgcttttagtaatggaatgaaccttttgacctagagacaaaggatgattctagatgacattacccactgtaaagttaaatgcaaatgtgtgggacatctgctgcctttctaaggccatatactctggcagctctgaattattatgttagtgtctagactgagaaagccataaagattgcatgagtgcttttgggggtgggggacaatagcggacattctctctttcccatcagtgtgcatcagcatttttaaacactgaaggggtgctaactgatgggcaatttgcttcctagcccatgttctaaatctcagagcttctagggccactttgagtttgctagtaagaacagagttaagtaggacctgatcccaattcacacaactttctggtagaagggctctaatggcccaacttacaccagtccagaggaaacccagcacagagcaatggagcaactcagggcagatccccagcacatgatcagaatggctcagaatgcctgagaggccttgcaatagtttgctgagaatgatggtttccagcttcatccatgtccctacaaaggacatgaacttcactcataggtgggaattgaacaaggagaacacttagacacaggaaggggaacatcacacaccagggcctgttgtggggtgggggaaggggggagggatagcttaaggagatatacctaatgtaaatgatgagttaatgggtgcagcacaccaacatggtacatttatacatatgtaacaaacctgcacattatgcacatgtaccctagaacttaaagtataataaaaaaaaaatatatatatatatatatacatataaaataaaagaatgactgagggggttcccgagccctatagagttcagcgctcaggctatcatgagccaatagataaagcaaggctaggagaaaaccagtcatgacaaaaacaaaaccaaaccaaaaacagcttaataacagattctatcctctttagttggacccaaacatctgcttagaacaagagcaaagaaacgtaaccagagtgatgacctagagtacagtggaggtgtaacagaatttctcaaccatggcactatcagcacttcaggcaagacaattctttgatgtaggggcctgtcctgtgcattgtaagatgttgagcagcatccctggcctccaccctatagatgccagtatcaaccccaccccaacttgccaaatgtcttctggaagcaaagttacctcatcaaggacaactgctcttgaatattaccggtctcagaaaaaccaatttcctaatttcccaagtaagctcactatacacttcagctctttatgagacaacaaggtgtggtaggaagaccaggaggtttagtggccaagaggctatgatcaagtcccagccactttgtactaagcatgtggacataactaagacagttcatctctgtgagacttcatatccttgtttgtcaaatgagaacaataataaccccattgctggacttttaagaggattaaaagagataataatgtatgtctggtgctgcttatataggagatattttaaaataatggttgttatgtgactcaaaatcctaaaatgctaatctaagacagagaaccacttgccaaagatagaattcataaagtaaaatattagcctgagagatggtcagcatgacaatttgtcttaaaagggtataaggaggaaaaaaagaaagaaatcagcaacacccactagaagatgagttcctcaaaggcaggaataagttataactagcagtgctaaatgaatactgaataaatggataaacctatctgaattggccttttgtcccacttttgttcccccactcccactgtctaatcttcatccagcaatcagagtactcttttgtaaacagaagttctccaatttttttctacacacttagaacatgacccagaaatgttaggctgctctgtgggatccagtctgcctcatcttgtgcctctctccccagtctttctgctctagtcaggagatcttcttgctctgccttgaacttccagaatcattcctgcttaggggttctctgcttgctgttctgaacccagagagctccccattctttcctaccctccgggtttttgctcagacaccatcgcttccaagagaccttccctaccatcctgtttaaatgaaaccccaccacccccctccccaccaacctccaatattctttattctcttacagtacttactttccgcatagtacttaattctgtctcaaatcatttttttttttttcgagacagaggcttgctctgttgcccaggctggagtgcaatgtcacgatcttggcttactgcaacctctgactcccaggttcaagcgattctcatgcctcagcctcctgagtagcggggatatttgtgtgtgtgtgtgcgcgcatttggttttccatctgtgtcctctactaaaaagtttcattaaagcagggattctactgtgtctactcagtagcttcgaggtctatcctataatgggcactcaggaaatatttgttgattgggtgtagttttgtgaatatgctcatgaccatgtggtcattctaaagggctttattatttgtgagtggagcctgtatatttttccagcagcctgcctcccttcgtacagggccctgagaaatggaataatcccattactagtgaatgaacaatcagtttctatgtctatatcccactccaaactgaacctgaaggcagattctatgtccttcttcttaatagttattgcacttctaatgcctatacagtgtctggcaaaaatgttgatttctcttaactgtcagatgaatcagaggaacaagaaataataatctttgctactgtcaacactttcaaatcttgggccagtcactcgtactgtatcagaagagggtcacagaaaacctgtcttcttctccttccaatacccctaatacatctctacagataaccatctaccacctggtctgaaagtctcactctctgaattgaattaaggtgtcaatgagcaataaaacattagctacatgtcacattgagaaagattaatttattaggtccagtagtgagattcatttatctgatcattagccactgccatctatggcaactggccaaaaacagaggcctaacttcagtgaaatggacatcaggcatttataagtgttcgggaaggggataagaaaaatgccaaaatagagttggcagtatgaaaaccaaacactctctcctcctattctcatctggtaagggtcaggtgttattcagaaatgacctagtcttctaaagaatgtgatcactcagctgagcatgatggctcatgcctgtaatcccaggttttggttttttttggtttcggtttactttaggaagctgagccaggagggtcgcttgagttcaagagttaaagaccagcatgtgcaacatagagagacctcaactctacaaaagaaaaaattagctgggcacagtggcatgtgcctgcattttcagctacttggaagactgaggcaggaggatcacttgagcctagaagggcgaggctgcagtgtgccattaaagcgccactgtactcagcctgggtgacacagtgagaccctgtcttttaaataaataaatatggtcactattgccacagaaacatcaagaagagtcctccctatgccagtgcaatgacattctggactctattacttacctgagggctgcaacaggcatttcctgcatttcccctcataaagtagaacattccaggcttaatatatgaagctgtgggatcagacaactaacatactagcctgactggagagtggagagtgataaaatgcttctagtttggaattaggcacggagatcttcttttaacggagataaggaatggaggagacattaagggaaatgtatgaacatgtagtaaacatacaaagctcagggtttatgaatgggcctcaagggatccttgaattccctgaaactgcatgcagcatttcgtaagtggatacttttccagaaaaggggtctatagttttcattagattctcaaaggtctccgtgactcgtggccaatctttcatagaagtctcaaaagaaaaaaagtaatatattctgtattctgaagacatactggtgttcacaggcagggttaaagttttgagttaatcaacccctccaacctccataaaaatcgattgaacaaatatgtactaagccccaaattatataaaagacactgtgcagccccacttttaggtgtatgcccaacagaagaaactgcaaaaaaaaaaagtcagaattcttttcttctacatgggaacaaaattcttagcaaaatgttgactgaaataacttctgggtttacaggcatgagccaccacacccagccctgaaataacttctgggctcatgcatttggactgaattttatttgcctattacattatcatttcccactatgtattctccctaatctctgttttgatatgtatttatctttttttttcattgttcctcttctcatgttcaactaaacctatttcaactgtagacattttccatgagcaaaattctgctacactactttgcattcactaaagaaatattagtacaatattcaacaaatgaacactgcaaatgatataaattaagaattctgtttttttaatctattaagtctgaggaagctgtaagagattagagcacaacctctgaaagaaatggaagtgaggaatagaactaagaaaatgaaaggtaagatcagatatgtcgattcagggtgtttattatagacacaaggtatttaaaaccatgaaactatttgcattggaaatggagaaattatggacttgtccttaacgtgacaactgtagacatctgtagaggcatttcatgaatcatggcaaacttgtaaccagatattattacttgcaacaaggtaagtaattgggaagttttgggaattttttttttttttttttttttgagacagagtattgctgtctctccaggctggagtgcagtggtccgagcttgatctcggctcactacaacctccgcctcccgggttcaagcaattcttctgcctcagcctcccaactagctgggactacagacgtccgccaccactcccagctaatttttgtatttttagtagagatagggtttcaccatattggccaggctggtctcgaactcctgatgtgatccacccatctcggcctcccaaagtgctgggattacaggcgtgagccaccgtgcccggcctgggaaattttatatgaaactggaaatcaaaaaaagtaaagaccaagcaataaagctatttagagtcatccattcgaatgctaaatatcagaattatgatataagggcagaataagagtgaggcaaaaatcggaaccagatggcaaaggaagcatgtgaatatgttgtaaattccaaacattactacacttctgggacgctgggtaccaagaattggaaacaggatgaggagaaaatgtttgttggcagcaataacaacaaaagcagtgcaggaacatccaaataacagtaataataatagctagcattaatgagcccctactatgttccagtgccttacacatattctcactgcatcctaatgaccactctacaagattctacagcagatgaggaagccgaggtcagaaagatgaaggcgcttgccagaggtcatttatacaggacttagacctaagcctgcctaatgtcaaaatgctaattcattcaatatgatataggctaaaagtagtgaacaattttgaattcattccttttttgaattgagtccatacatgtcaataggggtgtgtccaatctcacaaaacaagtaataaaattacccgtcttgagttgctttcttttttccttgcttttcattaagttgaacagccttacttttggagatatttgaaaatcacaagactaatagtctgtatgcttctgtgcacatgtattctcatgcatcatcatggattcttcagatcaacatgggcaatgactcagaggtgaaaatgataaatgtgtcaccacttgaggattcccaaaactgattcctcttgggggaaataggaaagttaccatagacaaaaagtcatcaggaaggaagtagcggagatttagagttgggattaaatgttcaggtttctagggaatctgcaaagtgtttagatttaggaacttaatgcctaatgtacaaaactcttacaaaagatgtgaaggctggcaaaggattgctttccgtgttagagtattcctcagtatgcactaattctcagctagagggaccacgaagagagcgaagagccaagccagatctcacatgctatgtttagccattagggttggctggatgaccagcaaaggagagagtcgttaaaaagcaaggttttgtgtgtttgttttagtgtaatgcttattttatatgttttaggacttatgacaaatttcactgggccactaacagttacaaaataacctacaaatcagcttagtacctaagaagaaaaccagtgaatttcagtgaataatgagaattgcctccaagtaacaaaacattttctccaccattacagattttcacaaggaaatttaagctcccttaacctattttttcctccattatcaagttatggacatgaacagccttgcagcactgtccaacagaacttccagtgatgatagaaatgttttacatctgtgctgtccaatgtgatagccaatggtctcatgtgactatggagcatttgaaatgaagctcatactactgagaatttaattttaaatttatttaattttaactaatttaaattgaaatctaaatagccacatttggctagtggctactgtactggtcactacaggaacttcagagcattgagaggtcctagattcttattttctagttcttcttgtctatgaatgttattttcaactcttcccttaagtttcatctctttgattttttaaacctgtatttaaacgttgatctcatttttctagattttgtttatactgtatctttgtcttaagatatgtaaaattcaccttttataggtcaaaaacagtacaatatcagcaatcttatatgattcaactttatataatgtatcataggcttctccaatgtgacctagatgtagcacaatgctatacacataggaaccatcagtggccgaataaatgaaagaatagatgactaaatattggttgaataaatgagtgacaaagtcagataggcagcagacatttgcgcaatactcagggtacttttcctcagatgaattcaatgtattggtactgagattcagccatgaagcaaaaacctctgagagtatgtttcagtcctgaattcagtaaaggcatcattcagaacagacaagaaaaaaaaaaaagacatataggaacttctgacaccgtaacaacaaaacaatcacagagtattgagaaattcacaagttccttgagcagaaaatgatttaaaatgataaagagtgggttgtttattgaggaaggaaatggaatcattagagatgggagatttggggatacgtgctagaaaaacttgaagagactatagaaaagatgtatgaacattctgataaaggactttggggagtgtttctatgtaataagagaatcagagaagtttaaaaaaaattgctggtttttagtctaacaaaataagctgttgctgcagacaaccttgcctggtgttgctcatggaagctcattatgcctaactttgaagtgaaaaggtggggttaaaatactcacgaattttctttctcccattctaaaaatgtgcttgtatactttcacatttcttcttcttgtacttatattcatggtcttcatttgacgtcattgcttacacaacaatctttccattaaaagaacacaagtaggtgataactgtaagtgtaaagcaacatctcatgtcaagagaaccaaatacatgcacatgtgcacacacacacacactccctgcagttcctcaggtatgaaatgatgccacaaacccactgctagcaagagatatacttgagaggcatttgcagagtgaaaaagaatttacagtgactcatctgtgacctttcatctggtccacatgtgtgaaaaacagcacacgtggacaagtcatatgaagggtgagaccaccctacgtggctagatattagagatgacaggtctctaaagggacagatcttgcacctctagttcaacagattaaaaaataggtacaaggacctatcacctacagtactgtgggacttaacaatgctataaaacaggacctagaaaagtagatggttatggaaatgacaattgataagacaaaaaactaatattctccccatccttctggaaaatgtccagaaaatctaaggttcagactttctagcagtgttttgaactcctttttttcccccattttcccatacttaaaagaggccagaataataggttacaatgagatttcaatgataaagtcacagtttggataagataccagcaggcttttttggagcccatgctataagaagcatggaaattccactctgggaaggagtgagcagcagacctggtttccatagcactgccatggaaacagctctctgtgactctgtgcctccaggccttctgaaactaaagcatcgctccaacacccacctccgtatcacatgcccccaaccccctcacaaatgattaaagaatgtcttaagaaagtggggttctaacaagataatatacattatatgtgttatgtgtgtgtacattaatttccttcaaagatgattttaaaattcagatgtttcttcctcttttattggggaacgggctggtaaagaagagaaaaataaaaacctaagcaatctaaacctaagtcaaaaaccctacacttgaaattggaaaaatacaaatcttgccaagcagtttattaaagagatgggcctactaatcccatgcattgggttcttttattttcttttgtctgcctggatgccagcatacaaatacaaaggattcaattaactgttagagccaaggagaggctcttccctatctttatcattgagggtttggtgcaggatttttttttttctcaatttctatcccttggtcataattttgcaagaagaataaaagtttggaaatggttttctagaatcagaaaagtccaacagaaggaagcatgggctctttagctagctttgtagccctcgtgcctccttctctgatgtctccaagggggtaaatgacagtcagacagcggtgcagtggtccagaatctgcctccacagcatgtactctagctgggctggagcaacgcccactgactgggagcaaaccaaaggtcaggaagcctgttagtcagcagatgctcgggaactcgacagggcatatcagaaaggctcttggcccagcagcacggtccacacacgagccacaggattgtagttagaactcttgaaatcccattcctgttttcaactctttctccacctgataaaataaacttgggacattaattctagcacatgtggaatgcaaaaatgcaaaaaagcattatacctgagaagaacctgttgctacagttgctggtcaaattgttgagaggaaacttaataaagggaagtttcaaaaatttgctgattggagaatggttattatttttttaaatgtccccagaataacccaatgatgagtaaagactaaggagagcccacatatataggcaaagacatttcaagtcaggccatgggtttccaaccgctcaggaatggttcttctgggtcaaacaactaaaatgctctgtcattatttctatacctgaaaattctcctgtctaccttgctgagtactgtgaaatggaaagcaaagctgggatcagtcagagttagacaatggggagtaaaataagatgggagttctgaattattcatttttatttatgtattgtagtggcaattgttatcgtttttttgtttctcctatatgttgagattgtaaaaagaggcctgaataattcagcatgactcaagaaatcataaatggagtactgtctgggcagtgaatgcctatgaaatagactcattttcttgttatttttaacatttgtatgatatgttgatttataatttaataacaacctatgatggcactaatgaatgcaataatatttgcaaggcatttcaatattctaaacaggaaaagaactgaatcgtcccactccctttattttaaccaaagggcaggaaggagccagcgacccagtgggaaagaaaaggggacatactggaaccaaaggccattccaagaagaagtcagagcccacacatgccacaggcatatttctgggtactaattcatgccctggttgtttgaacacttgtgctaagctcttcatgcacttttatttcataccactgcaagcctagaggcaaggcaggatttatttttaagaaggggtgttatttcagtctaagagtcacaggtaagttgaggaaacacagaaagtatatatttctcattattcttagagattgagaagccaaagctccaagtcaaacctcatatagttaaatctatttattatacctgtttcacaaagtccaggaatgctgcttgagagaaccaactaaaaggtgagtaaaaaagagagaatagaaagtagttttaagaagagaacatccattctcttaagattactagccctcaactttccatcaaagacagaaccatcatgacagagcctgtcccagagactggtccaaccctttctttggagccttcatgagtgtttcacaccagagatgttgacggccttttgtggcagacaaatcatcatacaggggtctctttcatactaaaagctgtttagcaaccctagccctgcccatgaagagagagtaacactctacagccacataacctcgaaagaatacattcacacatttccaacacctatgagagctttataagctcaactgtgtccctccaatgtctatatgttgaaggcctaaccactaggacctaagaatgtgacagtatttgaagatagggtctttagggggtgattaagttaaagtgaggctgttaatcctaatccaatctgacaagtgtctttataaaaagaggaaattggaacacacaagaagacaccaggacacagccatttagaagaaagaccgtgtgagtgagagagaaggtggccatctacaagccaaggagaggcctcaggagaaaccaaacctcctgacaccttgatcttgcacttctagccttccaaactttgagaaaatatattcctgttgtttgcaccaccacatctgtggtattttgttaccggggccctagaaaactaaaacagggacaataccacctccagctgagaaccaaaacaaggttctatgcatcttcaagactcagctacactcatgttgtccaaaaacccttactaatccctgaaagggaatatataataaatctccacttctttaagatcctaggaacaggatgtgtttcctagttcaaaaattttcagattttgaaaaggtaatagcgtgtatttaccaaatactacctagcactatcctaggggtgtctggggcaagatgctataatcaaacacataaacatttctcccacaaaacacaaaaatatgagcacttttaagatgaaattaagactacaaacagttttacagcactgtatgtcagattttgctgccaaatgaattcacattagttcatattttaatgctaaataaactacaaaaaaatcctttgcatatctgaacctgttggatttcagagtggcaattaagagactgtggacttggtcaacttcccttaataaaatgaaatccagaaggtccagggtccatacataaatggagacttccagtgaacaggagcaaccaataaacaacctaaacttcctgcactggggtttcattttcctcataggattctcccacttggttcctgacccgaggtgggtcctactctccttgaatctctgtctgacccaagtgtagacaaaacctctcccttagtttcccttatctctgatcaactaagctaagattttccaaaagattgtaccaaattccaagaaatgccaaagaggaaacaaacacagccatgctgaccctattcttgctagctaactctcagaggcttacagtccccatggagcccacatgagcccccaagagaaaaagagactagatcaatggccaaataccaatgccatcctaatctccaccacctagggacacaaccctatatatttgatacttctctggtctacagtacagtggagaagacgttgtcatttctctgaccatatatagccacctacccaagctcatatatttattcaataaatatttattaagcacctattagtttccccaaatcaactaagaactagagatacaacagtgagtaaaacactgaatttaccctcatggagcttcttagaaattgtttttctctgtattctgacagcacgcattgttcacccctgttatagtactcaattcattctaattgttaagtgtcagctttccttactacagtttgagcttgttatgggaagcaaccatgttctatttatttttcaagcatatagtacaatgcttggcctacattagggagctaaatgttgattgaattaatgaataaatgaactgggatgagggcaaacctggttgctaaatgctatccattttctcttttaactatctgaaaggaaatccttcctccttttccccactgctgagcctttgctatctcttggctgaattgctttaacagcctggtaactagtctccctgcccacaaaatccaccctctacactgctaccaagaagagctttctataataggaatttgattcttcccccttttgaattctactgcccacagaatgaggattaaactcctttgaataacatacatggccctttacagtctgccccaactggtttttttcttattttccaatttccttctacttgctaccgtacaaagtttgccccagttaccgagaaccactcgatgtgcctaaaataccccctgctcttccatctctgtacctctgctcatgctgttccatttttcttgaatgctttcctactatttctctcttcccgctctgtcccctaccctaaaccacctcccaacctgaaaaactcaagtatttttcagggaccagctcaagtgtcatttcttacacagagtttctctatttcctcaggcagtcatcctcatcctctgaaaccaagcaatagagtaaaggtggatcccaggacagagggctctgttcacacacacttacacataccatgcagctcagaggagctaattcttggccccaaatctgaactgtgaaatgcatccctcatcctttaagaggcagttgctaaaatgcaaatgtctgaaagatgcctcatatgcaaaggctaacctgatgatcccttccatcttatcagggtttagttaatggccaggtgagcaatagaatgggactggtgttaggaagaaggcagaagacagaaaggaagaaaagtgctacataaaaagaggtagcataaaacaaactttccttatttcaccatttgtctgggatcaatcctggctctgtgtagtaatcttgatcatttggtcatttagaaaaatcgtagcaccaggcactgtgcaatgttcttttggagccacatatgattgacaaagatatgtccactattctcaaacagcttacaatctagtgaactattgaattcacaagaatttcaagccatcattctatccaggaccagaagttcttttaccaaccaaacttaaagcgaagaaaatatattccttgaagtttttcagacttctaaacattactttctctattacacaaaataaatacgggaagcaatgaagctgtaagaagcctgccataaatattctcgatctcagccatgaaatatgtcctaattctaatatatataaggtatcaagtcaaagcaaaaccagggaatgatattgaagacaatttcatttcctctgcttttctattctgccttctgaactataagtattccttaaagggctgggcctaaagtcttatgaaatttttagcacaagagtttcaaagggaatttggatgtgtgcaaaaagaggagacaatacctctaggaaaaaatgatggaatcacacttttaatatatttggttaaaaataatgttaccactcttctaatataataggtcaagagaagctgaacaatctaacagattctgaaaggtatccctaaggtaggtccaccctctcagttaggcagtagtaaaagatctaaacataatcaatcgggcacattgtatgtagctgtgagggttagaagtacaaaatgtagttgtgagggttagaagtataaaaaacagtctatgcatttacaatctatttggtaagatgcagtgtgccaatgaagaaaggtaaatatgatagaataagacaaagggtaaagagatgaggaacagttaagaaatgaaggtagggggtaatactaaaaactgtttattgagaagattctacatgccaagcactttacaacacctctgttaagtctcataaaaccatacaaaaacacagtgataaaaagttttcctccctgacaatatcaggacaaacaagaaactttggttaagcaacaaacatttagtctttacacattttaagtcaaaatatataaatttgcatacatccgccaatcttttgatataggaacaaagccttcttttgatcactgatttgatgactggcgttccaatctttcttacataaatgacacccaatcctagttgtaattccttaaagatacttctaagggttgaggatcattttattccatttggatagccaaatatttcaatatcatttattgaaaagccttctttttccattaaattactctggcatttttattgaaaaccaattgaatgcataagtataggtccatttctgagccccattctgttccattgatttgtatatctgttcttatgccaataccacattgtcctttatagcaagttttaaggtattgtaagtcccccaactttgttattctttaaaattgtattgactattctaggtcctttgtatttccataaattttttataatgacatcaatttctacccccaccctgaaaaaaccccactgggctttttactaggatggagatgagtctaaagatgaaggtaaagagagttgaaatcttaaaatactgattcttttgatccataagcacagtatagctttccatttatttaagtcttcaatatttctcagcaatgcttcatagttttcagggtaggggtcttgaatatgttgatatatatgtataattttttccatggttttgatgctactataaatagtattttatttaaatttttaaattgataattctccagtagtatataaaaatacaattgatttttgtatattaactttgtatcttgtaatcttcctaaattcatctaagttctagtgattttatgtaaattccttagaattttctgcatagaaagtcatgtcatttgtgaaggaagatggttttactctttcctttctcatcaatattctatttcttttttgtactttattccatatgctacaaccctttgtataaggctgagtggaagcagtaaaggcaaacatccttgccttttcccaaccttggggaaaatatattcactttttcactattgagtatgatgtcggctataggttttccatacatatctttatcaggttgaggaggatgttctacatttagtttattgagaattctcaacatgaatgagtgttcaattttttcaaactgttccctgcattattgaagtgatcatatatatttttcatattaatataatgaattacattaattttcaaatgttaaaccaacacagtgttactgggataaacacctcttagatatgatgtattatcctttttatatcttgctggatttccattaactaatgttttttgaagatttttgctcctatattcatgagaaatattggtatatagttttcttatagtatcttgtcacttattggtaggaaaagaatactgataaggagttagaaaatgttccctccccttctatttcctggaagagtttgtgtagaattggtattgttctttctttatacgtttggtagaattcaccagtgaagccatttgggcttggcattatctttacaagaaaagattttaccaggaattcagtttctttgatatataaagaatgacttattatttttttcttcttgagttaactttcgtagttttctgtctctcaaggtgtttgtctatttacccaagttgtcaaatttattgacataaagatggttataatattcttttattagccttttaattttgatacgctctatagtgatatccccctttcttgcctgatgttgataatttatgttttatctcctcagttctgagccagtcttgctagagatctatcaatcttatcttttcaaaaattcagctttaggccaggcgcggtggctcacgcctgtaatccctccactttgggaggccgaggcaggcggatcacaaggtcaggagtttgagaccagcctggccaacatggtgaaaccccgtctctactaaaaatacaaaaaaaattagccaggtgtggtggcacatgcttgtaatctcagctacttgggaggctgaggcaggagaattgcttgaacccgggaggcggaggttgcagtgagccgagattgtgccactgcactccagcctgggcaacagagcgagactccatttcaaaaaaaaaaaaaaaaaaaaaaatccagctttaggttttactgattttctttaatttgtgtatactctacttcattgatttcccctcttcatttgttttccttctgtttattctgtttatcttactcttctttctctagattcctaaggtagaagcttcagatcattgattgtttatcttccttcttttgaatataatcatttaattttataaatgtcccttgaagcgctgcattagccatattgtgcaaattttactatgttgttgttttattttaattcagtccaaaatatatcctgaaggcctttgtgatttcttttttgactcatgcattacttagaagtttaatgtttaatttccaaaatttaggtattttctagctatagttctctttaattctaatgtggtcacagaacacattttgtataatttcaatcaacttacacttgataagactcatttgatagaataagacttatttgatagaatattttctaccttggtaaatataacatataaactagaaaagaatgtatattctctctcctgttgtttgatgcaatattctagaaaggtcaatttggtcaagctggtagattttatatatatataatatatatataataaatatatatatattttgtgtgtgtgtgtgtgtgtgtgtgtgtgtgtgtgtgtatgatggagttttgctcttgtagcccaggctagagtgcaatggcccgatgtcggctcactgcaacctccacttcctgggttcaagtgattctcctgcctctgcctcccgagtagctgggactacaggcatacactaccacgcccagctaatttttgtgtttttagtagagagggggtttcaccacattggccaggttggtctccacctcttgacctcaggtgatctgcccacctcggcctcccaaagtgctggaattacaggcatgagccaccgcacccggccaattaatctcttttaacctatctacatatttatatttaacatggatttgtcatagatagcatatagttgggtcttgctttgtatccaatctgtcaatatatgcctttcagtggcatatttaggccatttatatttaatattattattaatatgtttggctctaaatcattttgctatttgttttcttttttatctagtctttgtttcttctttttttttcttgccttttcttgaattgactgtttttttagagttctgtattacttccaccattattagctatactccttgccattgttttgatggtttctctaggactaacaatgtgcttcttgaaactgctacactccttcttcaaatactattacaccaggccaggcaaggtggttcactcctataatcccagcactttgggaggccgaggtgggcggatcacttgaggttgggagttcgagaccattctgaccaacacagagaaaccccgtctctaataaaaatacaaaaattagccaggcatggtggtgcatgcctgtaatctcagctactctggaggctgaggcaggagaatcgcttgaacccaggaggcggaggttgcggtgagccgagatcatgctattgcactccagcctgggcaaccagtgaaacttcatttcaaaaaataaataaataatattttgccactaaatagatagtataggacacttccaacagtaaatttcacccctcccctcattcttagggctacttatggctgtttttaatatttttctctttattgctaattttcagcagttttatttataatgtgccttattgttgttttcttttttttagtttgggatttactgaacttatcatatgttttacttcaatatacatcataaaccccactatacactgtttagttttttgctttacatggctagttattttttcaggatttttaataatgtttataaattcccaccaatttactatgtctgatgttcttcaatccattttgtagttctaagtttatatctgataccatttttcttttgcctgaaaaacgttaataattctgaaatacaaatgtaccattgactaattacctcagctttttttttcctctgaaagcctttattttgcctttacatagataaaaagatatttttgtatctttttaaaagatatttttgctaggtgtagagttctttgttgagaggtttttttttttaatgtttttcagtattttaaggacatcagtccatttttcctgacttgcatattttatgatgagaagtctgctgctattttaacctttgttagtttgaatattatatgtctttttttccctctggctgttttaaatatttttctctttattgctagttttcagcaattttgtttataatgtgccttattgttgttttcttttttttttttttttgagtttgggatttactgaacttcttaaatctgttgatttatagtttttatcaattgttttcaccaaataatttcatatagttttaatcaaatgtggaattctatttttatgcattaattcttccaatatttttctttgcttttcccttctgggtctctaattatatacatgtggactgatagataatttcctatgagtctctaaaacagttcatactgttctttttactctctgtgcttcattttcttttgctatactctagatccttcatattttattacaatgcctaatctaccattaatctcatccagttcatttttagttcaaatattttttctttaagttccactgagtcatttaaaagatgtctttcatttttcttcttcatcatgttcatgtcttcctttatatctctgaacatatttataacacgtctttctttgggtggggggtggggacagagtttcactctgtcgcccagggtggagtgcggtggtatgatcttggctcactgcaacctccacctcccgggttcaagcgattctcctgcctcggcctcccaagtagctggaactacaggcgcatgccaccactcccggctaatttttgtatttttagtagaaacaaggtttccctatattggccaggctggtctcgaactcctgacctcgtgatctgcccgcctcagcctcccaaagtgctgggattccaggcgtgagccaccgcacccagcctataataggtcttttaatattctttactaatattgtgaatatctttgttatttctccgtctgtttctaccatttttttcttgtttatgggtcatatttcctactgtgtatgtgtgtatgtgcatgtgcacatattcatgtgtgtaataatttttgaagctcctgtttaaaatgtgagacctttttggcaggaagtagcattcaggttagtttgttcctctttatggcattatctaataacctttattttagcacttatttatccctgcctctaagatatggctcttctgagatctctattaagtctcaatgagttctttctactctagcttaagagaactagaatggcctctggcccagtgggaattctgggaattgttcttcttatggctccttgataattgtttttttccacagaaagtaaccttgtccagacatggaatttcacctataatatgcacagatttgagcaaaaactcaaaaggaacccagcgcatattaccggagctccttctaaccttaggaattccatcccacaaaactctcatgccttatcctccccaaatgctgatctctgtctcctcaactcagtcagattgctgggttactcctcattgaacctcagtcctggaattatctccaggtaaacagcctagaaaaaccttacttttcttttctcaggaataataatcctgtgctacccattgtccaatgtctaaaagtagccattttcttttcccccttccaattttctagttatttatggtgggagggtaatttcagattgccacactccctcatggctggaagtgaaagtatcacaatttttgtttctaatgttcaaatcagatcatatagttcctgcttataaaccttcagtggcttcatattacacatgaaattaaatccagtctttaccctggcctctaaagaaagatatacattatctggtgcctgtctttttttctgaccttgatttctatcaatcttcccttgctcactatattctagccacatttgcttgctttctgctctacacttccatactggagcccttcaccttgctgttaacccttcctagggtaattctaccatagaagaggccatcacatagggggcatcctcttgtcatttaacctcggttcaaactttaccttctcagtaatggcttcactgaacacacaatacaaattagctattcatccaatcacctttcattaaaagatcccattttattttcttaatagaaattactactgtctaaaataattgtttattgatgtgttttatctgaccactcccagagcagaagatgtaactgccattagatctaagatatgtctatttactccggaatatccaccacctagaagagtgtctgcatatactaggtactcaatatgtgttgagttacatattgtttatttttaatgaaaattcagaacatagagataggcttgtgacctcgattgataagaaaagatggtgcgggaattgagcccttaacgttgccactgccctgtctttctaattgttctttctttgctcccactcctgctttatcatctgcagccctggcctaacagctaatttgagaagacccaatgataatgcaggttaactaagtcttggttgagtatttgagatttatctttatccaaattaaaattggaatcctcttcaatgtccatttctaagagggtgatgtgggagggaagggaagtcctgggaagtccacctgtttaggttcagaaaacctttcttttcctttctcagatgaagatattcctgagttcagagagaaggatagaaagatgacttttatcaaagcagttgctccatgcttatactatggagtccctacgacagctctctgacttaaagaaaggacctgcctcaaagagtcttctccttcttcttcccaacatgttgtgagaaggtaaaggagtgaagtggtaaagtgagctggcaggtaaggcagtaggggtaggaggggctgggaggatggaacaagagtctgtgtggcagttctaatccactctttaaagcacctgagacccactatctggaaggcagagattgtctgtcactgtgtcatcaaaaatgagttctgttaacaagctgaatataggagatatttgacaaaagcaggggactttaaagaaggatgtatctaaggtcagggattataacttgggcagcaacccaaaacaaaagcagggcacagttagtaaactcatactttttgttatgattgaataatatggtttttgtgaattgtattataacctgttagtacacagactctttcagctaagaaaactatcagtactgcaaaaactgaaacaaataaggttaaggtactcatgcttctactttgagaaataagtctttttcaacacatgacttctagatttatgatcctgcagaaatacccagagataccatttctttcatttcttaatgaacatgagagtcatagagaaactatagcaaacatagtaggagaaaaaaacaaatgtcctaatattctctggagcaaacacaagcattagcttttctttcacacatattagcttatctttaaaagatcttatcagaagaaggccaaatgtatctgtgtatatatattgacacacaaaatatgtatctgttctatattacattttatatatatgtacaccctccccagctaagaaactaagccacaagatagcatcaggcatacatacagatcaaaagccctgttaaagcaggcttaattcacgggcaacatttctgcctgaatattccttaaagaatcttttttctgcaagagaagaggaaataaggcctaacaggaaaaatctcaatgcatataacatcgtggtcatctgccctgccttatcacaggtacatatggaaaaatgcaagtgctgtagtttgaccgtccaaacctttgttgaaattcgatccccaatgttggaggtgggtcctaatgggaagtgtttgggtcatggaggtggatctctcatgaatggcttggtgccctcctcaaggcaatgagtgtgttctcaatctattagctgctgtgaaagtcaccctaagagcaggttgttaaaaagagtcttgcaccttcctgcttccgctctcccacctcgtggtctctggacacaccagctccccttcaccttccaccttcagaggaagcagcatgaagccctgactagaagcaaatgatggcgccatgcttcatgtacagcctgcagaagtgtaagccaaataatcctcttttctttataaattacttagcctcaggtactcctttatagcaacataaatgaactaagacagcaggcaagttaattttctgattctccatagaaccagtacaagtaaattctaagttgccccaaatgacaatgacagagctgggagaattctcagtgtttattaactgctggtgatcctctcttctaggatcccctagaagatgccagctcaggcccaacaggcatggagtcacagaagaggttactaaaaccaagggctatggagagggagattagcataatgccagaccaagcaacactcaataaatgtgatggattgaaagggactgaaattgagtaggagaaagggaacacgttaggaataggcaaggacagtagaagaagaaaaagaggctcatgtgggggagcccggtaactgccacccacaattccctctagaccaatgtcataggccccttgtctgcaccaggccagacctggccgcctccttggtgaaaggtttttagtctcttttcttattcagccttataaacactgtgtgctgacatatccagaaacaaatattaatgtgactgttcttaagagaaacaaatcagcaggcccaaaataaatacaataagcagtaccctgtgtttcattagtgttctatcatcttttcaggagaacgtgcctttggaagaaacactttcatatgtctgttccaaaatacaggcttccatatatagatgggcttttctttcttcccctggtggtgaagggcagtggggggcagggtagcatgtttttgtaagtttatttttatttattggtgctggccaacagaagtagaaggataaatttaaagaaaggtggtgtttacaaatgaaaatagagtccatgaaaatttagcaactttctaagaactatgtttcttcttacacgtatttattcttattatgagaacattataaagcatgctcataaatcaaagaattattaaaaagatacagaagaacatttacatcatctgtgctacttttcattcagatataacattattttggtgtctatatgtaatctgctttaaatgctcacatcttcatagtacaaacatgtattcctcctcatctcacccttatcctctgaaatataccacatcaaacatagtattcgagagtgtacaccttccacactactactgaataaaacctcccagagtagagacccctcatgcccactggatgggagtttgaagtctagagtctgtctgatttgccaccctattctcagtgtctagtatagtgtcttgaacacagcaggcactcaataaatatttgttgattataattttaacctgcctttttcatgtatttatagaaatgacattttcctatttcattattattctcttctataacatgatttttaatggttgcttatcatccataccataatttaatttaaccagcccttcatcactgaacatgtaaaatgtttcaaattactcaccgtgataactaatgctatgatgaccacctttcaagtaaatatttttgcattgtcataggatcaatttctgtaagttgaatagcagtgatgggtatacatattttgaggcttttattgccaaactgtcttcacaaaggtcactccaatttatatgtttaccatgaaattatgaaagtctctatttccctgcactcacatcaacactatatattttaattaaaaaaaatcgtcattctgatgaataaaacatatcatgaataaatagtatggaggaacaaagcggatcatgtaaaagtggctctgtatactggatgatatacaaatgttcattgttaaagtacttattacagtggttggaagcttcttgagaacagtgtctagcacagtgcatgacatatgatatggtattaaaaattatcatcccctgaactgaaagtagacagaggatgtagacttgtattaactcatgggtatatcatcaacctgaactagaaagatgcctgatcactaaaacatctcacaatttcaatccttccactcagaggtaggtactcaaacaggagaattgccaggcctggtcctcacgaggagatgaataccctagaacctggcttaggacagtcacaatgggcctcggaaccttcttcccctccatctcctctgcatattggccttttgcttattccagttttgctctccagcccttccctgattcccaagtctggttctttaagttaactgagaatgtgttctgttacaaattcaggtgtgttctcattagttttcctgaaggacctctgagcccaagatactccacatcttgaattcctactatctggcttatctcccactctgacctaaaacgaggctgtcatcatgttgccacctgataggtaacttttaacaaacagcaggtgcaaacatgggactgatagaaacaaacaacatccttgcaaccgaaggggctcaacagcccccacttcactcccattcctaccccattttacagatgcagaaatgaaggccccagagcataagggacttttccacagtaccacggattgttaatggcacagcaggtatcacaggtccttcctactaccccaggattcctccctaatgaagattacagatgaaaaaaaaatgaaggtcattccagcgatgctttctgaatgtggtcaaaagtgtgtcatttgaaagcttgctgcctcgtgatgtacacatgcccactgcctacagaaaaggtgcaaggtgaaaacacagtagtctctttgctaacttcttttttttttttttttttttttttttttgagacggagtctcgcactgtctcccaggctagagtgcagtggtgcaatcttggctcactgcaagctctgcctcccgtgttcatgccattctcctgcctcagcctcctgagtagctgggactacaggtgcccaccaccacgcctggctaatttttttttttttttttttttagtagagatggggtttcaccgtgttagccacaatggtctggatctcctgacctcgtgatccaccctcctcggcctcccaaagtgctgtgatgacaggcatgagccaccatgcccagccctcttagctaacttctagaactagaagaggctgtccacaggaagttccaccagcagctttagctcaagctccagcaacacatcaaagggccacgtcatgtttcacttacaatgcagggtgtcatctttgacctacatgtgactgcaccagtgttatttcccactctgggcccacatatcagcagccctgacactgcctgggttcccatcatgtcactgtctggctgcagtggacctcgtccctgggtcaactcttgtcttgtttacctggctaattgtcttggtgctctcccttcggccctttcacaggtgaatatgcagggaacagaggggaaggtgtgaatgaattaaatctgagaattttgtgccttttgtccaaggatttcagagatagccactttatagccaaacatttggaagccatgatttctgtcttccaaaagcaatcaccatctaagccagtaaatctcaacttctgtatattagagtcaactggagagcatttaaaaataattctaatgcccaagctgcaccctgaaacaattacatcagactctttatgggagcgacccaggcatctgtatttttttaaactccccaggcaattccaaagtgcagccaagtttgcgcatctctgctctaagtgtgggccaaggagccttctctaattggccttcatgtgccaaggacagagcaccagcaattaaaataagaaacaggagagttaaatcggtcttgcttttctcattctctttctttccccatttttataacagactgtaattcaactggctcaaagagctatctacaatctatggagcagaaataatcctgaaggaaaggaacgcctccatcccacagccttctctttttctttttttaaaacattgaccagtttttgtccttaccctcagattacagagctttcttgatttgaagttcatattttcctgggatcctaaaatgagtggtacagaaaaagctgaggcgcatgcaccctcatttatcctgaatcctgtctatcttgtgagcatcccctaaagggagcacgtgcctgggaagaagtttctgggaaataatatttaaaatccaagccacagttgtctcttccttacctcttgccattcacaaaagggttttacgtaaaacagaaattcatttgctaccagcccagcccagaaaaaaaacaggcatcaggagaaaacctcacagaaagggctctcagaaggccacggaaatggcagccccacagacatagacccacgtgcaatggggaaaaggatgagcttggagagaacatcaggaaggcaccccctttagccttcagacctctccagttctggggacaggtacttaaattagcattctcagggagaaaggcagggatggatgtaaagaggcacaggagttgtatgagagggaaaacatagcacattaaaaaaaaaaaaaaaaaaaaaaaagaaagccagcaggaatatgtcctaatttggagaaacaggccacattgccatggcaactctgaatctccacaaggcagccaggcatgcctttaaacatcatgttaaatagttcaactatgaagaagaagaaagaaaagagtgtaagggaggtttgagagaggaggaagagccctgaagcctgctgagggccagagggagaggctgcccaaggcccagccattcttcaagagaaatttcatacagcgaagctgcaagtcctgaactggatcttttctctctgatctgggcaggttggggactgcatttgtatgtagttaacctgtatcttcagaaagattctcccaaagccacacagctgccagcccagtactcctcatcctcttttccagggctgccagccccacagcaaacctgcctgccatactcaggcctttcccaggagacttgacgggcatgtgatcttgtgccgttggggaagtgaacccagcagtcctgagggctgagcacagcaattattcggccacacctgtaaccatgcatggaacactggttaggaattctggcctaagggggaagaaaaaacattttatttattcaaaaaatgtaaaagccacctggaaaccatgcctaaatgaagttatgccatgtgtggtcctttgggatcaagccagtgatgctggcaattcagggaagagttttctgcgtggctctgaacctttggaaaataggaataagaatataaaactgttctcccatctggaacattaattactcaaattatgcacttaatgttcagcattcatttcaccctgcaactagttctcaatcacattgccttccacattactttgtctcttttttctttcagaagtctctcccctagtccttctggcctgtttgcctgctctgcctttccccttttctcttctgttgggacctggagatcttctgacagagccctgtgagctgagcagctccagcaggtgagggccaagccagaagctgagaaggagaagcaaatggtcccatgcctcatggcacactcagatgccactgtgagaagtggtgtgtgtcataggtgtccaggtaacctgatgagccccgtacggcccggggaatggagaatgcattcttctcttagctaaacaacaacaataataatagaagcagatgggtgcactgctatccccgggctctctctttctttttgttcattggcttacatcaaatcattttctctatagatttattcttagcacacaaaactgaaatttccacttgctctgctgtgctctctctgaaactttccattccataaacatcccacaactcagaatgagtccatcttatctgtcctgtatggccctgactcaaggcagaggcctcaaggcctttagggggcttcactatatccctagctaaaggaaatcacacctctcccacaaaacacaccctctcttggccctatctcctccaaccaagagcagatctttctctgagacatgtcctcctctaccacttcacacatgcatgtcctggcccaaaccacagtccccctgagtcctgcatttctgcacttgtacaacaatctctacctcacaggattgttgggaggcatgcataaaatatctgtgggggagggaggcatggtgcctggcccatttgcaggctggcaatcagaagggcgcccttctcagccaagcattggacagagtgtttagtgaggtaaggcatttccttctatgttaaccatacatggctggcattattcctgttttaacagtgaggagcctgaagttccaaaaggttaagtcattgcctaagttcacacagacaggagccagcaaaaccaattttgactttcaaattcactgtccttaaccatggccttcctctcgatggtggtgcaggatgtccaaatagaagggcttggggttggcgatctgttcaaaaggcagggctcagcagctgtgctgaggcagcaccacatagcaaacacatctacattcaacatgtgtatttatttgggatggctgctatggtgtggggagaggaaggggttatagctgatggaaatctgtgaacagctagaagctcctacctccctgcctccctaggagcggccatgggcacactgcgtttctaacaaatgcaaataaatattaaatatttgtttaatagaaaataccatgcattctttgactgcaattttgctttttctctagttggatctccatgaattaccaagggatgtaaagacttagaagagagttacaagaggaaatgtaaaaccatccatttttaccaaaattaaatgtgcaaaaggctacatatcggagggatgaggacaggaaagaataagaggtaaatagcaaatgggaaaatgagaaaggaaaacaagaagtgtttaacaaacactacttaaaattctcctcaagacaaagcctgaagcacagtcagcctcggcccaaagcacctgcgtggtccattttccacccttaaagcccctgatattcccttggatgcttcattctctgaggaaaaaaccctagtctaaatccatttgatcctgaaaacacaaaggtccatatccgaagcaccccagtccttcagtgtaacctttcttaccttcctagttctctctcctttcctcagttgaataacctgcattttaaaaataactgaattatccatgcattgttttatcacattacttcaatggcctcttctgattacagcgccaaccttctggcctccacttcctacactatctgtctcttcctgtctgtcttttctccccaccacccccccatcttatctattccctttcctgtcacctcttcaaggattaatagggtgaaaacactcattccatcagcagtcactgatgctcaggtgtggcacaggagaatttctaacatggcctggaagcaatctaataggaagggcgaggaaggggagtggatggagaagccagatgtcttgcccaagaaatatctgtatttcagggtggtgtgtagaggaaactaccagcttgctcccagtgccctgctgatgcaaagcagcataaatctgcctcttcccctcttacgtattattccaggcactccagcattcacatactcatgttcactgacaactgcccctcttggaaacactccaccagggagctcatcagatagcagtcatttagcaaggcccccagtgcctgaaccactttttttgccagcatattcacccattcactctgccaacacatggcaaaagaggtgccaccaaggactcttctgtttataacacctactgatcacactctgaggttaagtcagctctggcactgtgaagcatacatgtgcagaaaggtgaatgaagctacagcaaagaatccgtcatctctacagtagcctggcaggctgattttctatcatctaaaattaattatatggcataacatgcagagacatccacagaacaagggagacaggttggatcagggctaagaagtacctgaatgagagtgatggagcccagaagcagctttaccatgattacttacacagaggagaggttgggctagaatattttccagttggagaaaatttgaaagtggttcaatcagtgaaatgtaaccacacatacaatcgtcatggtgaaaatccctgagatgtttttcagctccctctagccagaatatgaacaatacctaatgattgtgcagtgcttatagctcaacgaagcactctcatgtatctcatttcagtcattacatcatccattattttatggacaaagcagctttggctcagagaggttcagtgatctgcccaaggtcatgcagctggcaagaggcagagacaaacggaagccccaggtgtcagacaaaggtcttgtgactgcacgcctcagattgatgccaccatggtccacagtgctcagagaaacaaggacaggaacaagaaaggcccaaagaaccgagaacaatgtgtgtactaaagccatccaacagcatcaattgactataaaaattcagcttctttagtgactcataaccaggtcaaagctttgattttattgaacggtccagtaagctcattcaatggacataaaaaaatctccataatagaaaatacgcatatgcatgtatatttatcccatatagaaaccatgggatatttttatacgtgaatcttttggaataaaatgtaatgtttctccccacctagctagaaggagaacaagtgagtttaccttagagtgagggatcaaaccacttgtaactcaaagggtgaggtgtgtttcactccatctctaagagggcattatgcatgccactacagtgcgtaacgtactgctctgtttcagcctgtgcctctcagttctgccccacccagccctccatatcactggggccaacttcactccctctggattttgttcattcggtagggatccaagcattctagaaacatggagctggaaaggaattcaaggtcattttgttgaaaggaaaaacagcagaataaaataggtaaaaattccaaggctgagaaacgtgccttggatgcttactgtgcattaggaggtggcagtaaatgaatgtatcagtgcaggggaccttgtgattcgtagacaaagatacctgatttagatcctggctgcccctcttacctgctggacaactttgacaacaactcaacatctctgggccccagttttcttgtatataaaatgggagtaataataattacctcacaggattatagaaaaataaaaacaagatcattaatgtcatatgttaattaatataatgcaattaaataatatagccactgtaataaaataaaaaataaagcacacagcaaagtacctgatcagttccagttaggttactttctaccttttacctgtctaaaaatcactggatgtttctttattgattggttccaaaaatactactacatagctgacttttatctttcgtatgctacattctctgagttttttgttgttggtggtgatggtggtggtgttctctctgagccctgaattgtttgtcctatcattttttacatatttctaaaaatataagaactccttcagctccattctccagagggcagaaacaagaagtaaagaaaaattgttcctcactatgagtatgaataacgccctatagccatgtgtttattaagtaatcatagttttcctctttttacaaatatatattggagcagcatgagattcctgtacatcaatgatatgacatgatattaactcaaagcaaagaaacatatttttcttagcctaagcagcctagttgtagataaatgtgaagttatgttgggttttgtaacactaaagacaacttgatgagccccaggagatgcaattctcattgtatggctgaagaagctgagacctaatgaatgatttatccaagatcacacagctagccatgccggagcctaaactctaacccagtgtttctaactctcagataagccctcttacctctgtaccacacttttgatataaacttccaaccagaaagttgtgtagattctattttctcagattattgatgaatatgtcacacgggacagaaataaaaggctcgctaaagtcaagacacagtacattgatcacttcccccgcaatcccggaacctcatcagtctgtcactgctggagatgatgatatcccataggacctcagtgccacacttttcactgtgctgtaatttctgtcagagaaacaagacacgagcagagcccttacctgtcaggctctagcctaacagttcaggggacgcatctcgatccacagctcttagaagcaatttccttggaaacactgtctctagcaacaatatctacaccagtgcttcccaaacactagcccatggatcaatgacaatccatgataaagttatcactggcccacagaaaaatgagaaaaataaaaacaatgtattgggttgttgacacagcgagatgtattcaatttaaaggactgttctttattctgagatcatatatttcttagttttgtttgtagtttccatatcctttgtttttttaaaaaaaatatggtataggactattttttaaaagtcgaaattggaaaaataacaattcatcgtgctacatcatgccaccactgccactatcattataaaataattagtctgcaaattgagaaatcagaaacctctcctctaagcaactggcaatagaggctgtgtgcctggaaggagcaaagtccccaccaagactggttccctcttggccaaaaaggaggcttgacgaagggactgccactgccagtatgggtcatgggacatcagggagcttcgtataaccatatcccaatatgacactctccactcaagtatcttgtgaattcagccacataggggtttcattatgttacagttcagacttctgttttaaattatttgctttcatttttcacttcaattaacgtaggtgggtaaccacctaccaggtgtcaacatcaccagcagttttgatatgcattatttttcttagtcctatgagataagcccttaaaatgtccaaggtataccacacccggcttttgtagctcactgccgcaaacttttcatgatcgtcccccagatcttggttgctcaaattcaatcttcctcatctaatttctgtgccattttctccttttgtgatgcattctgcataccactattgattaaaacactatgcatgttcatctatttctccagcttcaccataccctcagtgatttgtaccacatctaacacataaaggatgttctgaatgagtaaaactaatcctagaccactttccaaaaagctaatcattagataatttgatgaaattatcaaaatgttgacttcttgcataaaaataaacctgaaaagtaggctaacttctacagttcattatggaaatagggtgaaaatggggtctagtgaagtgatggcaaaattaattaggagaattataacgagataattcatataaagctcttacacatagcaagggctccatacataatagtcttccttttccaactccttttctgattagttgctcattggaatgttgtgaagattggtttttcttttttttttttttttttttttagaaaatcttattgttttcaaaacactgctttttaattttttgcggtgttttgtttttttttaatttttactttttaaaattttttattatttatttatttatttatttatttatattttattttaagttccaggatacatgtgcagaatgtgtaggcttgctacactggggaaaaaaaaaaaaaaaacactgctttttaaaaacaataatatcaacactgggcccaggaaaaccacctcaaaaacaccattttggcttttcttatgttctcctgaatccccatacacatcacacacacacacactcgcacagacacacacacaaatactcactttccaaattttggttgacatctgattgctgattactatgagtgtgatcttccagacaactgtgtctgcatcaagtacccctaggggtcattcccatttgattctgtgttaatatttttataatttttgtatttttataatattttcacaaaatttcataatttttccatgaggccaaatcagaagcttcttcaaagtaaagattaaatatacctttttttcttaaaatgtctgcaccttcaggctttcacaggatattaaatcagtgtgacagcacttttaggagcgtaggtaagctactagaagattagcacaatttaattctaagaacagctggtagttgataaatattaaacagtcagaagacaatttagggctagaagcaccaacattctaagaatcatgtacaattattatgtctgtttttgaaagaggcatttttaaaaatattaggaacacgttgcaaatctatcaagatcccatcatttgtgaagtccaacatgacttagattttaacaatttgtttccagccaatcaccaaatctctttgaaatgtgtcatgttatattggcatgcttgtctctttctgtttgtgcctatgtattctatttacaccacccagggtaaagtgatgtttaatactcattttaataccaatgttatcaaaatatattttagcctacattcaacagctctggagtaggccaaaaccttttctcctcattatcacctcagtgagagtcccttgccaggatctggctaggaggcttatatctgacaaagcttaatgaagtgttaatgaagggaaaccatcccagcccatttagagctttattcagaacagatttaagagtactctggtaaaaggctttaatagtggctctttttcttccccaggaggggacggataaggtgagaggctgtagacttaacttggtcatatttggcttgaatggttttgccttttgttcactaaactgaggtttaatccttctccttattttaaaattcctctgtatgggtccattcctctgtatgggcctatgaattcctcattctagatagctgcccaacctttccaatcaatgtctaggcccttaagcatgcactgttaacatacccatagcttctttttcttccctttaagtaacttcttcatcctctctagtcccatcaaagctattcatttaacagaaaaccatcagccaaggtctacaaagaattccgtggccaaatcctctgcattccatttgactcccctgtgctgacatggcaccactcatcaatcatagccattcagcactcttcagtgtagcttacatggttctcttctcttgcagccattaacttaggggccagaagacctacattctagtcctagccttgccacttagtatttctccatctttgacatatcatttaacttctcagagacttatggtgatgatggggatagtgacaatagctatcttcacttttcagagagagaatttgagatgcagtttcccatactgcacaatcgttatgagtatcaaattaaggtaaagtatataaatttactttgaaaactgtaaaacatcatgaaaggtaatattttgttatctttatctcctacctccagccacatgtactgtagtgttccttcctgttctctcttccaattttcctttcctttctttctggaagactccctgcttttccagtatgaatttctgctgtacacgaatttctctgcatacttgagcacttctttcctaagtagctcattagaagaatgcttcaagatgaggagtaaaggggctgacttcagggtgccacatttggaggaaataaaagaactatctatggcctgtgagtagttgggacacaccagtttctggagtgttctttgatcattgaagagtctcacccaaatagaatttagattatccaaattttctttccatctgtctgcctacgattatcagaagttcatataatctctaatatataggctttctactatatacagccccaaatgtcattaatattaacttttatcaatatcaatatatttcattaatatactttcaatcaattatctcaaaccacattaaaatatcatatcctccctccctaccctagtcctaatttcagtttgcccttgtcctcacctctaatcaggagagagaagagatagcaattcattacatcatattatctgtagactatgaactattagagaggactggtattttgttgactttaaagttctactagaactgatctggtaatctggaaaagtaggccagctccaggagagaattgagatgtggcctcaggcaagtcacttaatctttcttggcctcagtgtcctctattgtaaaataagggcatgagactagtctctaagatcccttccaaccttgatggtctttgataccatgtagtaagataacatgttcatctggatttttgtggaggggtgaggaatagagtggagtggggatgaaaatagagtgtgccttattaggaattccctttcctttccctactgcatgtaaagagcttcaacattctctttgcaaccttttatgtgccaaatcttaaaatctgtcagcaaggatgcagtttaaaaattcataattggatcatacatcttcagattttaccaccactgctcatttcctttgtttactttaatctactcaccctgaaccctgtgcatttttgatggctttccacctatttattcactcacctttccttcactcaacattctcttctcatggacatcataccagaaacttcttgaatagattgtaaatcccaacccctttattttcagatgaagaacaaagaaagattaagggacttgcccagagtcaaacagctatatggattataaagcaaagatgagaaccagacctcttgatttggtagtttagtttaggctctttccactctaacatctacaccatgcaatgaatatttccattcaaccctatggagtactccaaagaagaataaagccctaaaaagcgagtagcagcataccatccgctacattgcccataagacttaaattatttttaaaaatattagccctactctctttccttctatttcaaatattggtgacatataccttccattttatataatcctagttgtgaataattgcatatttttcgcagttgctttgacaaatgaggttgagacttctatagactttattgttgcatctctacctcaaatccacccaaaccaatctttttcttgtgttgagactgcctgctgatattcgactccaccaccatttagctcagtcagtgctgtaggatctatgtgaaaaagcaattaaatcatttctgtaattattctcccatgcttataaataaataagaattgcacattcccccggaagccacgaagggcccagaaacagtgaatgacagggaggaatgaatgaggaaacatatttgcgaaggcagtaaaaattcagtgaggtgatgataaatgagaaagttggagagtgaaaataaggaaatggttaagagtcgggaaaatggaaagagaagcacaaaattgggagaaaggaggggaggattcctaggaacattggtaaaaataaaaaacaattaagaaagaaagcagtataacaaaatagacccaggagcgagagagaaagagaaaggagtgcaggcagaggaaggttaaaagaggccaaacacgtgtcgcggttgctattattttccttattgcaaagctaaggaaactgaggcagagaagagttaagcaggctaagaacatagaactaataagggagagccagaatcagtccaggtctgtctgggcctgaattctatctattatattgagctcaaactctttttcaatttttaaaattacaaaatgtgaatctatgatgatctcacaacaaaatgtttaatctaaaaaatttatattattattcctgatatcccttatcaataaattagctacagctcctcacccaggcccccactatgaccaagcatatggatggggaaggtggctgctggagggaatctctgccgtgggatggaagagcactacaaggtcccacagagatagggcattatgtccttgggtggcctcattacatgctaagttctaaccaactgaaccaactggccacagacaataaagctaatgtttgatagctccaaaagtcaagagcagaccacctgggaacttttaactaatgccaggtccaaaggtaggctacagaggggcctcagcactgacaggatgaagcacgatgatggctgcgtgtaccacataaggtagaagccgtgtggaacagtgggtcacaggagatgggggggaggacaaggtgggagaagggcagagagacacgaaccagagatgcaatgatggagagcagggagcagggcaaggagagaaaggaggacagagagaaggaacaatcagagaagccaagaggggaagaaacaaagaaggatgcatgcacaggcaggctgagatgagtccatgagggcagggaaaagcagctgagggttcttagtgcagaaagtagggttaagccctctctgtagtgtggatggttaaaacggtccataaatcgtcggagttcaccaatttatgtggacttccctcctctgccagattctcttctacttcccagagcaggtcctgaagtccttctgccttaatagacaaaattctctccaggctccagagcaggtatggacagtcccctgctcagctgaggacaactgacaccctcctcaagcagctccccttcagggtttctgtttgcagcaaggtatcccagcagagccacccctcatgctaggatcagagaggatccccacaaacggtggaatctgtggccatcaggaaagtaccttccgtttaaaatacatatttcccttatggtccaatggggtatctgaaattccactattacaaacttctttcactaagttagaatacaaatgcccctagggagggaaacccgttagttgctcttgtctatttggaccctggcaaggacttagtgttacagactgaaaggaggaaattctggggccacgtggaggacagacccaggactgaatcgaacactacttcctggagaaaccccagcagtgccaggagcagagggaagcaggaaaagagtcctctgggcaggcaaagggcagaaaaaaggcactggagaattagaggtaggagctgtcaaatgacagaaaagaacatggaaaaggaaggaaaaaatggttaaaagtagattcttttccaattgcataacttttccctgaactgaccatcaagatcaagatcacaaagtggccatgattgctacttggaagttccagaagcacacaaaaaaacccttttcaagccctaatgcttcctcccacagacaaaaagccagctccagatacttccaactcttaacagcttcagaagcccccactacaatgactagttagcctctttcttgaacccaacagagcacaagagtggaatacaccaacgtgagagaaagtgctcttctcctagagcatctagaaagctgaacggtgtccttatccccctctctgctttgctgagtagttttcataacaaccactgaactggtttcccttctggaagaactgaaatgacaccagtaactacttgctgggttaccaagtcttccctttcattgaccagtgagacttctcctcgggcacagaaactgcagggccaaatgggtgaagttccatgaccccaaatagtactttcctcaataaaattagtcaccaatttgttcttggagaacaacagtgatgagagaccagggcattcacgtctgtatcagcctcttctgatacagatgtgctggttagatgtctggaaaaaatgacatggcaggcaagcaggcaagcaggacaagaactgggactctggccgctgctctctttctaccctgcagagcagcccggtcttgagtcctgctactcagccagtccctgtatttggccagagcaaagcttccgtggcttatatgagtgtaactggacctacagctgtcacagccgttggacaacttcaggtaatgttggtctgagccatcagttcccctacttctcccctgcttggtcctgggaattgttgcactcacacttcctgccccaattcctctcttcctgggctctgactccaggcttcagaccttatttcctgttttcagtatcaactctggcttctagagccatccttccagaacagaagactctctatgacctccattcagaggggcggtgggggaaaggttctggcagagaccccaggcaagcagccagcttgggcctaggggaagagaattattcacaggatcacagatgttagagatgaaaagaacttgcaaaaacacatctcactcatccatcccaccttgtaatgtaggctgttttccaagagcatatggcctgttcccatctgatttcaaagaatctatcattaccgacaaatacacactgagcacacctcgtgtgctctgtgttgtcccagtcatgaggggtggaaaccaaggggctctctttctctagaaagggcttgcacactgtgtgataaatttacttctctcatgcattgcctgagcccgcctagatatctgtcccatcatgctcacacagatatcttccaaacacctgaatacccctcttgcagataagcaagcctctgattatcctgggaaaataatagggacaatagatgctgaaggaccagcaatgggaggaactatgggagggtgctgagggggacaatggaaacagcctttgggcaacaccaacactgactggtaaagattttggtctgtggtaacagcaattacagctgattctctaagactattcaagaagtaagaaggaaaagattgctctaagacctatcgccatccaggatagtgaggaaaggatactctcttccttgtcaacttctcatctactgagatggaatcctagaccttagactgatgtgcactcaattttattttctcctcacacacaccatggtacagaaaaaaattcccccaatccccagggttattgaagagtttcagctgatccaggatcaaatcctggggcatccagttgaaagtgttctgggcttgaaggtctcaggttcactctcaaccagagtctagagtttggagagaattggaattcccatgcagctgcagctcccaggccccatcagactgggggtggacctgacagttttgcccaccctacatcctttcttctctaattctctttccctttctacttcttgtctttcatcccactcttgtctctcccttggctattcccttattctgaatatttaggtcttaatcaaggtcaactgggaaagggaggaagtcaactttgccaggctccagttagcccctgttgcaatagctgggatatcctattactccaaggctaaatgcttgatgtcccaggagggctgaataaataaaagtgttcaaaataaagtgaagcatactggtgaaatccatggacttcactgtcatttagataagtgttctagtttccacactgccattaatagtgcgggccagttgctttcctttctgattctctttcttcatctgtaaaagaaggagaataatactactgtctaaatcctaggtctcctttgaaggttaaattggctcagtgcaggcaaagcaccatttcgtataaagagtggcaccagaaatgcagtaggcatttggtttttctaaaggggtaataaaatgaagctgacctcttctgaaactccaaatttggcccaccccactctcctcccaaccagggcaaatccaggattcaaaacatacccaaaagagtatgttaatcaattctgggttaagacccttaacaacctgcactcccactgaatatcagagacaagagagttgttgaactgacatctgatggtggatttcagcgtctctaattccactgactttctttgtcattttcatggtgtttcctcccttctgttttcatttcctttcctcatctccattagcttcttttcatttttctccaactcttctttctccttcttaatctttattaagcattcactcaatgacattgcactggaaaccatgatgagaaatctcaccaaatagagcctgacctgtcacagactttataacctaaacaacatgacatgttctactcaccagtggttctcaaactgggaagtttataaaaacagtaattagtagggctttgctccaaacctattaaatctaaatccttgggtatgaggccagagtacctctattaaaataacaataataaaataaaatctcccctgttgatttcaaagtcaaccactaccatacactaaaataaactataaattctaccaagctcctttctctctttcttgctattttttaactccttcgttctcaccatcctctcagctcattatgtcaaactgttttatttttgagaatttacaatatttgctttgatataagcaatgagaatacaggaatggtaagaataaaaggcaaagaggttggaaggagatggaaggggtatgcagacagtagatctgtgaaggcaaaagaagtggagcgatgcagatggaagacagcagaaataagagtaggcagaggaggaggagggtgggtgggtggaagcagcatgcagaaaccacagtgcagcctggcttcctgggaagcctgttgccctagcaacgtgatgctgaaaggttaaaggctgcttgctccctactactctggattacatgttgccaaggcaacagaaggcacccaagacacgtggtggcaggccatgaggacttgggggtatgccaggaatcctcagttcaagacaggctaccctggctggctgcaccattgtgctaccttccactctcaacccatacctcagaagctcaccccagatgcagcattccctgtgatactcttctcagtgccaccaccccactttgggaagggaggaaatgatattcagctgcaactaggtagacaaatccaggaggagtcaagggacactagtgcatggaaactccaagaactcaaaaggagaagcagccatttagttagaggaaagccaattataatgtatctaacttcctccattgctttgctcaactgtttgcaagcttgtaaacaaattttgtaaaaataacaaaacaaaacaaaacctgcataatacacctatcaaaagaaaaggatgccttttcttttaagaggaatttgtctttcaatactagtagataacagaagccatttattcaaaaccaggtgtgtacctggcagagtaatgagtgacttaaaaggttatttcatttaatcttcataatagttctttgaggtggaagagtattaaccacaacagagagatgaggaaaaaaaaaaaaaaaaaacagatcacagaaatcacacgtggcaagaggtcaccgggctctgaaaggtggaaccagaactcaaaatggctccatggcatatgctccatccacgatactatactgccgccatctgaaaagacactatatcaggtaacatggccccattcttacacccagaatgaataaaaaaacagcaccctgccaatacctcaggccctatatcagccaactccggagcacctcctcagcctcagctatactgaccctcctattactcatcaagaaacaacagcaaccaaaacactttcccacttgaaggccttcacacctgctgttctctctgccaaaatgctgcccctcagatcttcaggcatcttgatccttctcaccatgaaaatctcaagggctacctcctctgcggccttccctgacaaccctaactaaaatagctcacaatacctctttctgctattttcattaaagcattcaccactatccaaaataatactgtttaattgatgtgtctgtttactgtcagtcaatgctccatgaggacatgtctctcttactgatcacatctccagaacctcaaatagttcctaatacccagtagataaaagatattttgtgaataaataactgagaaagtatgttgtttggagaggaagttactacctttgaaaagttaattacattgattaaatatagttgggtgataccttgacaattagcatataatatgaattgcatatgtttattttccaaaacatttaaaactgtttctttctgctcactcttttgaaagagcgctaataaagtcagggctatcactggcacttaaatattttcatgataaaagtcttgctctgctacctcagatggcacccctaacctgaagcaggccttttgccatgtctgtctgctaaaaataaagtggacacaaatgtgataactccagctggaagtgccaggttgctgattgctggtatctggccctcatatctgtgaggaagggaaaggtgatagagctagcagcccagagagacgtaggaatgtatctgccagtaaccacagagattaacctatcagccattttcatttgggtttaaaatacttttctcttaattgcaactgacatttgctgccccgaaataattaattcatccatacatttaataaatatgtattaagggcttactctgtgacaagctatatgttaggttctggtgatacaaaaatgataaagacctagtccttgcccttgcaaagtctgtagtctagcaggacggagaactaaaagaactactaccattacttacagttgtgatatggactatgtatgaaatgaaaagaaataaagggaaaagaaacaggagttttgaactgatggtagagaagaaaaaatatctgagggcatgaggaccttgggtgaggagtacagccctagaggagatgtaccacttgggccctggaaagtagaaaaatatcagcaccacacttaaacacacacatgcacatgcacatgaaacaagaagcatgccagaagcagtggctcaggcctataatcccagcactttagaaggccaaggtgggcggatcacgaggtcaggagttcgagaccagcctggccaacatggtgaaaccctgtctctattaaaaacacaaaaaataactcggtgtggtggtgagtgcctataatcccagctatgagggaggctgaggcaagagaatcattcaaacccaggaggcagaagttgcagtgagccgagatagtgccattgcactccaggctgggtgacagggtgagactccacctcaaaacaaaacaaaacaagaagcaaaaagcaaaaacaaaacaaggagagaggcatgcagaaagggaaacactagtgctaaaagacgaacttcaccttgccagtcccaccaagggcctcggtagtggaacagctaaagggaacactgacaccctttcagcattgtcccaggcctggagtgaactagaaagagcatcacctttggagagaacacccaaactgcatgtccaatgaccacagagctaggtgagttcaagatcatactgttgatggtttgtgtttctgtttacttcattcatttattcaatggagacttaccaaataactctcatagacccatacttgctgattcctaccattttcaaggccttttctaggtactttgaacaatcttacttaataacctcaagaaatagggtctaggccaggcacagtggctcacacctataatcccagcactttggaaggccaaggtgggtggaccacctgaggtcaagagtttgagacctgcctggccaacatggtgaaaccccatctctactgaaaaaaaaaaaaaaaaaaaattgcctggcgtggtggtgcatgcctgtaatcccagctactcaggaggctgaggcagcagaatcacttgaacctgggaggcaaaggcttcagtgagccgagatcatgccactgcactccaggctgggtgacagaatgagaccctgttgaaagaaagaaaagagacaaaagagagaaaagagagacagagagtgagagagcaaaagctctatttgtatcactattttatagatgaggaaactaaggctcagagaagtgaaggagttttctaaaggtcacacagtaagtggtgatagaaccaggaaacagcaaggcagtgagattccagaactccctcacttaactgtggtgtgtgtattcatttcctaaggctgcagaagactcgggggcttaaaacaacagaaatgtattctctcacagttctgaaggccagaaacctaaaatcaaggtgtcgggagtctcacactctaaggctctaggggagattccttccttgcctcttccagtttctggcggctttcctagcttgtagctcaacaactaccacctctatctctctttatatgggcttctcctctgtgtctgtgtcttctcctcttctgtgtcttataaggacatttgtcattgaatttagggcccacccaaataattcaagatgatctcatcatgacatctttaagttaattacatctgcaaagaccctttatccaaataaggtcacatttatggttccaagggttaagacatggacctatcttttgaaggatcaccatgctacccagtgcagtgtgtatagagtgcacagtttaatgagtgttaattgtttaatcaaagttagctgtcactatgcacctgacactatgtgctaggaagacgaaattactaaagcatagccctggcccacaatgagcctactctacagcaagagagacagatgtgttaacaagacaggttacaataaaagcacgaagagggcacaggtgacgcacaagaaaagaaatgccaaattctgtgaaggtgggagtcaggaaagtgtgcacagaagaaacgccatgaattctcctataaagtggacaaggggtgggcaaggaagaggacattctaagaagaggaggtggcaaagacaaaagcacagagatgtaaaacaggcagaaccattcggggagctgtaaataatttagtgtggcttgacattgctgctcaagggcagggaggttaagagaaatcctggagaggtggcctgggaccagattaaagaggacgcttcattctaagctgaaggaagccagggcggttttaagcaaaaaagtaataatagatctgagtttccaaagaatcataggtaagcttccatgtggcagcacagacaagagagaatgagtgccagcccttgggtcactgcagcgtgtatggagttgaggggacaaattggagctacctacgaaggtggaactatcaaggtcccgttactgtcggaggggaagggagggctctaagttgatttccagactgagaaataactccctttttagaactcttggtttctataatgcttctccttccttgctcttcttgttcttttcttatctctctgataattttgtctcagatcctttatcatctgcaccttgcacctcccctggccatccctcaaatggtggtgcacccagggttctgcccttgacccacttctctcccctttccactgttcactctgagccatctcatccactctcatggtttcagctatcctgtccccgcaaataaggcttatagctacatgtccagcccaaatcattcactctacctccaggcccaaatccaagtgcttactagacatttccacctatatgacccacccatgttctaaattctatacattctcattgctgctgtcaccaaatctgtgacaaatctaattactcttgtcatcataatttttgtgactagcactaaaagggtcaacagtattcagtgctgcagaaggtcaagaacaacttgaaaagtccattggatttggcaccttggagaagtgagagatgaggaagtgcaaaaggcaatttcagactaccctttaaggagctgaactgtgaaaagaaggagacaaggagggagaatgagcatcaaggaaagctttcatgtttgtttaataagatgagagtgatttgagcatatttatgggccacagtgatagttgatattttgggtaagactattcttgacagtgggacactaacacatatattacaggccacttaacatgccggttctctaagttctcagtgcctgtggcgcacgcgtgcatacacacacacacacacacacacacacactctcacacacaccagttattatggcatccaaaaatcaccctcatacattcccaaacatcttctaagaatccctaaaagggaagataccagtagagaggaataagttgaaagttaagaaaaaaagaaaataactgatgaaccaagatcctaattctggagaagactagactaaagacacaaaagagggtttggcgtgagacaagggaaatgcaccatgtttgggctttgattcctacaggcattggttgaattcccaggatgtcacttcctttgagacacagtgtactacactgtctgttgactacactgtctgttgactagccccaaagccattcccactcctttccccccttgtcacctccaccagagagacttgcaacgtccacagagttgcccatgtgacattgtttgggctcatgaaatcaaggatgtggggaagacttcttctaatccaataccaacccacttcttcttccttcgttaagtatgagcatgatggatgactaacgctggagcagccaccttccaaccatgacaaaatgccaggcgaaccccagatgtcagtactgacatcactgagccagtgaaccacccccagcagcctctgtctctagactctttgttctgagacacccacagactcatttgtttaagctacggtgagcaaatcactacctaaaggtattggacaacatagttaacctctctgatctatagtttccttgtctctaaaataaagataaaatatgtgccttctaaattcaatgaaaacattaaatgagataaaatatataagatgactagctcatataaagtgactaactcagagtttgacaaaaaataaatgatcagtgtcagtctttctcatcataacctcaaaataacttacaataattagatcttctttgtccgtgtaaaatagaattatagcaataaacctttattgtactcagaaaggtagaataaaaataaccacctttaatgttactctcctgcatgctagacctttaaactacagaatcaaaatacaattttgaataaaatgtagatctaacagtaagacaaaaagaatcacagaagtctcagaaaggggactaaaaatatactctttgtatagaactcataattcagggagtttttttcagcaatatcaatgtgatgtaaaaattggctggcaatatttagtaaatttatgttttcttgtatctgtaacattttactacttcccacctagtaccacgaatattttcttcatgtaataattcacttttttttaacatattaacacttccaaatctatgagtgactctgattcaaacactattttattccgttatgtttttagaaaatgatcttgacttgtctttaatgcttatatcctatgtgtatcagtttgttgaaatcactttatgtctctgctttgaaaatcctgataagttctgatcaagtcaatatcagtaattgcatcaccaaagaggtggaacctactgagctgttgtttatccaccatgtctaaatggaagcaggttaacatccccaaatcttctatttctgttaataggaaaaattagaatccattttcctcaagtgatttaggacaagtctggtttttgagaatgcaagatggcatatactaagcaccaactgtctaccatgcactgggtacattgcgtcataaggcttgctaccctttataagctgggtgttatttttgttttcactttacagaaggagattttgaggctcagagagtctgaagagtccaactaaggtcacatggctgagaatgaatagagctcaagcccattgactccaaagtctgcattctctccttgtgctggtaccttcttttagacaccatcacgtccctggaaaatgtatgacaagtgatggctggtgtgttactttccagcaccaagtgcctgtatttctatgaatgtcgaagcaatttctgggcttcaattgttacaagcattaacactgctcctaaagaaaatcctagctccaatttttaaagacaggatgtgctggccaacaagaaacacatttcacagaagcaggtggaaagagccagccagacagagctacatcactacaaagtttccagtgccttagagagcactgcctacccatctttccccaaaatatagttcaagtagggaaaattggagagaagaaactgaactccaggtaattttgtcctggcttttttttcttactccctcatcgtatgcactgggaaaaagtcttaaagtcaagcatgtctgaattcagatttcagtcccactattgttgtagatgtgtgactttggccaacatacataaacgctctctgatttagtttccccatcaagaaagaagaaatactactacttccctcatgggattgcataagaattaaaatgctcattaacatcatgcctggttcaaaattgacatattatgttagtttttttcctctcacttttcctacctctatgtcttaatacccttcatccaagaaatgccataacattacagttttctcccaaagtattctgtcccgaggaatattatatcacagacaactaaaagcaaggtaacaatctaacagacaccagaaattagtgaagaagcgtagggtaaggcatgagtaacatgtagccatcttggtttcaagattatgttggatatgcaaatccatatgagccaagggaaggcaatagtctactcccagtgtcacacaccactgccagcccatctactctctccaaacccactgtcattaagcaagtgggggtagaggataggggaagagggccagaggatgaagccaaagaagagtagggccatcttcctatccccaattagattccaaaatgtggctctcagtacagaaaatgaaaagtgctattgaaagcatccattcccaaagaagcaatttattatttattttattttatttttgagacagagtctcgctctgtcactcaggctggagtgcagtggtgcaatctcggctcactgcaacctccatctcccaggttcaagcaattctcctacatcaacctcccaagtagctgtgattacaggtgtgcgtcaccacgcccaatttttgtatttttaatagacacggggtttcaccatgttggccagaatggtctcgaactccttacttagggtgatctgcctgcctccgcctccaaagtgctgggattacaggcatgagccaccgtgcctggcccccaaagaagcaatttagaaaggaaagaatcatagcaatagactccacagtaagaatatttttgcatgtcatctaaggaagaataagatccagaatgtgatgcacgttttagctaccatgctacaccctgatcaacatgtctatttccagatcctgaccctttactcagcatacccttttcttccccattcttggagcattaaagttggatcttgaatccttttgcctgctcctactgtaacttctacctttctattttccttcctaccttctgctcaagccattttcattagtcctaatgccaaggacaaaacagttgtcattgactctgtcattccctatcactactccttatttccctcacctaaagtgtctgtttgccacggtactgccctaaaatcttccatatattttatttcattttatcttcaaaatgtaaggtgtatagggcagaacacaaaatttatatctcataaactataaactgagtatcatgtagtataactaatgtgtttgtccacattttcaaagctcatcagaatggagactaaaactcagggatgtataattcttagttcagtgtcttatgatgcagaattgtataatagaaagcataggtttcaaaacaggtattcctgagatttgaattctagtcccattgctaatagtgggctgtgatatcctggattagttacttaacctttctaagctaaaatctgaaaacccagggaagatttcagacaatcagtagaaaaacctcctagaaataaatggaaatacatctagcttcagttcattatttggattcagatgggcatcttaaatccaggatctcagggagaataaaagcaattataacaaggcaaaataaaataggctctttatactcaggtggggaactgccaaaaagcacctcatacatttttaaacattctccattactattcgaaacagtctctgttacaagcacctagcagttctttccaggttagagattttctttaagggaccccgtgtggctgcagcaggcttccatactacttgtgagcctcagcttccctggtggggtgagaccaagactcccacctcacacttcagagccttcccccagattttcacctttcaaccatatgcccttcttgggtggtctccaatttagagttttttctacaatggtccatgctgcttttcgattctcattcttttcctgcatcatgatacactctcactcccttcaaactgctccacatggccttcagcttcacctgctgaatgttaggctggacacttcagtgaagcacttgccatgtatcacctcatttaatcctcgacaaccctgtaatcaacatattagtatccccattatacaggcaaggaaacaaacgttgagagtcagggattggtgacttgtcctgattctaacatttaggaagtgatgcccgaatccagcttggactctaaattctgattttttaatagccctactcagctagcccccgtgcttctttccaccataatataaagctcatttcctctttgggaaagcagagtgctaattaatgttcttactgattaattagcatatgcaaaaaagtgagcacatgctatttgacgaggtgctgaactgctgaactgtgtctgtgctgttgtcaaaagtcttcagaagaatgctgtccttccagcatcaaaaacttcttgaatacaaactttatccctgtaatgcaatcatccacaagagcacttaataagtgggttttattggaaataaactaacaacaaaaacttaagttaaaacagactgacaattacctgtctccgagaaggggagaacaaaatagaaggcttattgatcatccttcagacgattactatgagccttcagtgtggccaagctacatgtcttagatttactgcatcagttccactttcaaatgttttttgtcctattcccctgttgttgattaatagttgtccaactgtgtgtccccattctatgtttgtaaaatatggtcatggtacttaaaaataaacttctattaaaaaaacaaaacaaaacaaaaaaaaaacctggccttagttttgaggtgttttatctttgaaatttgtcccaaaggcttttttctctgagatttggggactctttttattggcctttatgcaaatctgttaagcccccaaacattcctctgcatggctgctgggaagtttgctgctggcactctctctccaggtagctcctgccaccacccattcagcatcgaacgcctggggctgagcctccaactttccaggatctccattactggatctttttctttcttcttttccctcttgctgcttaccttttagaaactattctttccaggtcaaaagtcagatatttacgctattttagaaaagcatctaaaagtcactgcccacctacctccttatttggcggagagaaagacatgatggaatatttgggtgtggtagcaatgaaggaaggagcaaggggaaagtgatgagaggaggtctcattacagtgacctagaagaattcactttactggtgtcagttctcctatttactcctggaaggcagtagccagtgggtcctctatggaactgtgctacacttaagcgctccaccatttcatacccttgttatgttctcttgtagttagactccagtattgcctgattataaatcatgtaatagatcactttcagtcagatgacatcccccacaatgccatctaacaagggagaaagtgaagggtagtaagatatatgagaccttaaccagtcattttcttgagagacaagagagtacacagcctttgaagctagcaaccaatgttaaaatcctggcttccacttaagagctgtagcattttggatatgttacttaacctctctgagcctcagtttccccatctgtaagataaagattaaataatatcacttaggtcgctaactggttaagagtattaaataagatagtacatacacagcactaagcgcctagcatatggggaacactctcaaagcccctaagatacatcagcgaaaaaaagagttcagtctctctgcatgctctgcaagttaccttatatttgtataatgatgttgtggatttgtaaaaggtaccagagagaagcaatcagctagtttaggcataactttttctaccagggagaaataatataggttgcacaacagcccacatgagaaaaaaatcatttttacctgttgtgctctcaaagtagatatgtacttattcatggtaattttaaaattcgctcttaaccatatcagaattctttcaaagcaaaattgtgccctcaaattgccactgttaaaataaaatataatttgctaaggacaatcatatttgaaaaaaagaaaaatctacctgaagcacaactcaacgggttctgccacagcagtctacattttccattttgcttatttttcccacttcccttagcatgggctatttgtgctagtgcctattttctaacatctgtacctgcacccacgtaaatggaagaatatgtttctcatatgatactggaatgtcttcacttaacacttttaacttgacctttcctagactgaagggaagctctgaagcagaagctagtcatctctgcctgctgccgacaggtggcggtaacggtcatgcaaggttcctttagtctcggctcagctgctccactgcggaggttgtcaactagccaggcagcatgcttgtggtgtctgtgctaggttttaaggtgtttacaaacattattaacccgaaagcatgtcttttaagtacaaaactaaaggcaggtttgaatgtggtgataaaaagtatgacaatgacaatagtagaaacccaaaatgatgaaaaatgataaacgtagcacttgtggtgaaactaactattctaagacgtgaatggctggctgcaaaggacagtgcatatgtactaagtgctgtatctaagtaatgaacaataatcagtaaagcaaggaaaataactgaataactgatagtatgtaaaaacaaaacaacccaaagcagaataaaacgcttttttctgcagttagggaataagccccagtgtcaagtggcaattagtcatatgacaattagcctaacattaacgcaggagaggctaggatttgttggagatttaaagcagtggttgtcaatcttaactgcactctagaatcacctggggagcttttaagactcccgaagcccaggccaataatcagaatcccgaggggtgggactcaggcatcagcagtgttgaaagctcttcaggtgattttaatgtgcacccaattgccttcaaatctaagcatggggaaaaatgtgttgctacaggttccacggattaaaatccatctggatgtgcagatcaatatgtgtgatgagcgttaataccttggcaagaattatttccctatgacatttgtatcttcaagtagagaaatcacctgccttgagggatttttctttttatagtcttgaaaacagtatgggggagaacacgtattgccaaagaataacagagtatgcctttcatatacctatttgaagaaaaggtatcccagagctacaagcgtcaacatcccttagtcatttcagtgagtccatttacaaacaagtggacacaaaaaccttttcaaaactataggagtttctagataccagcacctttccctcactttcatctttaacagattgctaagcatgcacggtggctcacgcctgtaatcccagcgctgtgggaggctgaggcaggtggatcacctgaggtaaggagtttgagaccaacctggtcaacatgctgaagccctgtctctactaaaaatacaaaaattagctgggtgtggtggcaggcgcctgtaatcccagctactcgggaggctgaggcaggagaatcacttgaacctgggaagtggaggttgcagtgagccgagatggcatcattgcactccagcctggctgacaagagcaaaactctgtctcaaagagagagagagaaaaaaaaaggattaattgctggcctatccacgctgtcaatgcaatctggttaccttccatcattaacaatcaagttttacaggaaaacaaatgcatggtttagtcctcagcacaaaccctcaggcccttctccctgcagcccctttttaccttatctgccattatcatagaggagcccccgtggatgcccaggatgggggtgagagtctgtgctgaaatgaaatcgaggatctgggcgatggcttcctggtctgtgtcatcagcaaacaccaccccctggatcttccggtcagacatgagatcacagatgcgggtgatgatgctctttgggtcggtctcattcatggctaccagttccacccggggtaccacggagagatggtggaaatcatctttctcgtgggcatccttgatggccacctcgtcggaagtgcccacgaggatgacagcaatgccaatgctgggggggctcttctgagaacgagctctgctgcctgacacggccaggacggccaacaccaaccagaacttgggagaacagcactccgctctgggcttcatcttcaactcgtcgactccctgcaaacacaaagaaagagcatgttaaaataggatctacatcacgtaacctgtcttagaagaggctagatactgcaattcaaggaccttatctcctttcattgagcaccaaacccaactccatctaccagcctactctcttatctctggtatttgctctgcagaatgagagaaaatgaaactttcaaaagcctcagaaatccttgaacaaggcaataaaaggtgctattgctatagtcattggcagctacaggcagagacaaaggaggaaaagaggttgtgagtggtccaggtagccatgcgagtatgcatacacaaatctcctggccctcctgttacagcccacccttgtactgttcttgggctgaaggaaagcaaggccagacaaagtgagcagaaaaacgtgctcagcagaggtgagcaacagaacatgggctggataaactggatgtggggggctataagtacacaagccctgcattcttgctgccttcaccttatgtttgcctcaatgaggacaacagccagaaaattctttagtaaccttgttagtatctggctcttaatattaaactacaagaacaactgatacatgactagtagttttaaaacattgcctcaattgatccttacaatgacccagtagggaataaaataagaaaaacattattatcaccatttttataaatgttgacgccaaggctcagagaagctaagtgttctaagaccatgaaccaatcaattaagtgaaacaaacctgaacccagatcttctgacttttgtattccaatatgtgttctattacactacgtggaactgcctctcatataaccaattattataaggaacacatattactccaatctatttatacaccaaaatacagaaacttaaacaaataccattagcagctgaagtaatgttagagccacatttgaaaaatgttcctttttttttcctgatgccatcctatagtcgtgacttccctaaaatgactgataccgtattttcatataatttgccaccttttacctacaaagaactccttcctttttacttccacatatgaccctaaatcttattctatgcatcaaactaaggacataatgctctatagaatataagccttggccatctctctctatgcttctcattattctccaagagctcctcttattttaatataactagttctgcttatgtcgctttattttaaataatcagtgttcactattcaggtgatggctacactaaaaagcccagatttcaccactatacaatatatccatgtaacaaaagcacatatttactgcccgaatccataaaaaattaaaaagaatcatttattgtacatcttttatatgctgcacactgtgttagacatttcctcatatataatctctctgatcttcatggacactctataaattagacattttattcccatttctcaaatagaaaaacagaagctcaacacagttatgtaattatccaaggtcaatggcattataacaccagcatgccaatacataaacacagcattttaatactccaaggcaatactctacaaactgcaaccagaaccaaaaccagattctcattcttctacaaagagagagagcatacaatcaaggttgaaaatgctgcttcagatctcctgcttgtttcaaaaaaaaaaaaaatggtgagagattaaaaatctaaaagtgttgagagattagctaatcatgacagtattgaataaagaaagataaggaagtgttcgagttgagcagtcagtcttgactgcaaagggcattaatgatttgggagcaagatgctggggacattttgtggctgaagaagcacaaaatccaatccagttcttggcagaaaacattttggaacttttactggtatagtcatccttcaacactgccaagaaggagacctgtattgattgccttgtctctctctcacaaataagatgagtagctcagtggttcatgcctgagcaaagtttactcctgacagttttctgatctcagtgtctctgtgaaaacagagaatgactccatgagccctggaaacctttgctgatgggctgtacacaatttagcaggagaaacagggcctgaattcctcctcccagaacttaaaggaaagaaacactagataggcaattgagtagtactgatattcagaggaagacagaaggagtttgacaccacaaagagctgtggacaaagtacacacacacacacacacacacacagttcaattccaatgactggttctcaaggaaagccaaaagatttaccatttggcaaaactataagctaacttcattccaatggtattctaatcctacagttacaagtcactaaattagtttccttcacgtttaaaagtggcccactctgccgtgacagtttaactttaatgcactccactctcccactttgatgttttatttgctctctctaaagtatctcttgtgttcctttatcttgtctcacacaatatattatatttggctatgcagtggctagttgtgacacccaaagaatagcatctggttttacagagcatctcatttatactcaggatacagcaaagcactttacaaagcaatacattatgggagataacagtagcagaggggctgtgagacaaagaggctactttgaatacaaactcaatttccaacattaaaaggggattcattgagggaaagcatgtagtccaagataagcagagtggctttgctcccttcctcacagagaccataagtcttgatgcacctgctctaggaagtcttgctctccctgtagaattgagcattgcttcctttgggctctcaccatagcctgcatgtatctatctaaatacacataaacttttattaccaatatatgatgatgtgtccacctactttaactagttgataacctccttgtgagcagggactttttcaattcagtaattattgagcacttataacctagagaacttttttctttttctttttttttctttttttttttttttttggtggggaggatgcaacagatacagattctatccttcaggaccatggtctagcagaagatacagacatagacccataaggaaaatgttttcctcacttttattcatattcttgagctctaacagtgcctcatatgcaataaggaaggactcaataaatggtggccaatactgagtttctaccattaggttgaaccatataaaattgttaatatttgaccatttttgacctgctagtcaaatagttcaacctgctgggtaccagatattattattgccaggtaaatttcatgcattattagatactcacaaaaacattgtaagtcatactttccttttattacaaatgagaaaactgagggttaagtacatgaccaagattacacagctaataagggatgacatcaattttcaaacccaagtttgtctggctccaaagcccttgctctttcccttctggggcctctcagtataatatgagtgttgagtgaatgaatgaatgaatgaatgaaatccccaaccaaaaccaactgacgttttaataccagttctgtgttaacacagtgcctgaggatgggcgagtcacctaattaccatctctatgctatcatcggtgaaaccaggataatatacctaacctacatacctgaaagatttttgtgaagatcaaatgaaaatatgtatatggaagtgctttgaataatctaaaatactccacagatccaaaggatattacgtttaagcttctatagaagctgttcaaggagcctagctatttatgatagcacaaagtgagtgtgtgggaggtgagggtgaaagaatggcagacagaggctgaaaggaatgttaagaggaaccgcgcatggggcaaaagatgttagttccctgagcgatataactccctgaagatgtcccataatggcctcggggtagcagcgacctccactgacagcttactagtcatgtagatgaattcaataatcactcaggccagggccagtattgggaatcagtggagctcagcatatcgaaatcatgccatgaattcagaaaccagggtgcaccagaaggaccagcaacaaagcagcaggattagagagttgactgttcactcatttggctctttgcctccttgaagcttgggctaagtgatcccgagatccatagcaaacagaaggccacaggagcttatcttcatgctggtaactggtacagggtaactatagcaggaaacagtctacactttgctcagagcaggctcagagcaggctcaaagggaagatacatctgggtgagaagccaggccaaccctgtccttagaaaactgagtcctggggcaaccacaactggaagaataaaatgtgacttaatcaataattaagtcaaaaatattccaagcaccatcccttaatgcagtcaggacattatttggagtgattcaattaaggagactatgactggaatatgacaggcagtgagtgaagttaagattaagatgccagaactatgtatcaggtccagttttccaagctaccaataaagacagaaagttaagagacataggcttaaaatatgtcacattagagagtggggaaacaataattctcatacaatggaagtcaagaagagtataaacgagtataacctttttggaggtcaaagtggtagtatctatcgaaattttaatatcaagacaaaataaaattcaaaggcaaaaaatatcaaaagggacattaagtggtataacatataggtaccaggaagaagcaatcattatgaacacatatgaggctaaaatatagacttttcatgtataaggcaacaactaaaatttacatggggagaaacagacaaatccaactgacaaaagatcttattaactaagacataaaagatttttttaaagcatgagttataagttcgaactagttcagatacctagaaatgtatatagaacagagaatagatgttctttttaagtacatacatgaaaaatattaaatctacaaaaatacatcaatagattaaaaaaatcaatatgaaatcaattgtcatttttctataatgtgattaaattaaaagtactttttaaaggtactaaaaatactacatatccaaaatcttaaaaaaaaaaaacttgtgattaaataactataaggttaaaaaggaaatcataagggaaactaaaattcctttgaacagaataacaataaaaatactaaatgtcagaatttctagagcacaattaaagcatttacagagaaaaatacacttttaaatacatttataagaaaccaagaaaataaaatatgattaattataattaagttttcacttactgcattaaaaacttaacagtcaaccctaataaacaagaaaataacaaatgaatgaaacacaagacaaagaaaagcaaaaaacaaaactgatcttttaaaagacgtaaagtcctgacaagatgaatcaaaaaaaaaaaggagagaaaatgcgaatgaaagagaaaataacatatataatagaaattttgaaataatgaatattatgaaaactagttacttttccatttaatgtgtaatatataataaaaatggcaaatagggaaaggggctgaaaagaatgtagaacatttgaattaagttttagaaattttagaaattgttattaaagcccacacccctaatgtgacaaaactactccctaccctagtcctccacttcccacccaatcatcccaccagcccaccccacctctgccaaaataaaaagaagcaaaagtggtacagatggttttatagattaagtatatcaaacttttaagaaggaaacgagccttgctcatataagtggaacaaaaagaaaaagacggaaagcttgattctagattcagataattataagaaaagattattataaaccccttccacttatggacataaaggaaaaaaaaaaccttaaaaattagtggccaggcacggtggctcacacctgtaatcccagcactttgggaggccaaagtgagcagatcactaaaaatactaaaaatacaaaaaattaactgggtgtggtggcacgtgcctgtaatcccagctactctggaggctgaggcaggagaatcccttgaacaacggagtcagagcttgcagtgagctgagatcatgccactgtactccagcctggcaacagagcaaggctccgactcaaaaaaaaaaaaaaaatagtgctaactaaaacacagtatattttttaaatagtaatcatcatcaccatgatcaattgcggtttatatctgaaatgcaagaatggcttaacttcagaatatgtatcaaaataattcaccacattaaagaactaaatgagatatttacatgaatatctcagaaaaatgcagataacatacttgactaagggaaatatatatgatagaaatgttaaattgtgtttaaaacaaacaaataaaacatcactctttgataataggaaatcaagagatcgtcagcctttacctggtgggtacatccaataactgtaatctatgtaggaattaacaaaagtcttaacaagacctctacagcaaaaatttgaaaactttattaaaagatttgaaagaagacccaaacaatgtaaccatataccacattcatgaatgtgatatcatagtattttaagttctattttctatcatttcaagccaattcttatcaaaataatagtaagattttaaaagaaatgctataaatttattctaaaatgtataagaaaggataaaagtacccaaagaactattaaacacaatgtccttatctgaacctataatgaaactgtgctatgaactaagaagtatggttgactcaattctgcagaacagatccaaaataatttttaattaatacatttttaagaattgtaagttccaagtcaattaaagttttaagttataccttctaaatttaaatctagagaagcagggcaaatgttgaaccaaagaagtgatcttgactcagaatgcttagcttaggcaatacatgcattcatcaaccatctgaggtaggaaatgtgagtatcacagatgacaaacatctacttttcaatatcactattaagtagaagaccaatatctatttttgtcaaatggcatctatatattcagggcatttaaaaatccaatttcaatcctctaaatgcacttagtgtctgctaaactactaaatatcatccaagtctgtagaaataacacataaaaggcaccaatctttgatttgaattgacttggaacctacacttctgtgttctgttattttcctccctctcacactattaccatcatccgttactcttttcaagcttttgagctcccttgccctgctctttcttcagaaaggagcaaggtaagaaatcctgagagtctggggcatggaggcaggggctgagactgtgcccctgtgaaaccagtggagaaagaaatatctccctggacatgctagatacatgcccaattcatttgtcattgagtgacccacatgacaataaacagggatccttggtcctggagttggggaatttactcacctaaatatagtcctgcagagaattaaccccaaatggatttcaacatattacagccacataaataatggaaacagaaaatcaaaaccttcattaaagctgtttcttggaaaatatttgatcagagaagagcaggatagatgggagagagggaaaagacataggctttgattatccaaatctctgagccagcagatgaaccaacaagtcctcttacataatgcaggtaaggacgcccatcctaagccccccagctcctgtagacccttagaagaagatggccccatcactgccaaaagcaaaggtgatactggatctcttggcagcaatatttctgctacatctttcctggaacctctcccgagtaagagccttctcattcttcgttcaaccagacctgtcacctgggctccttcttgtccttacagcacttccagtggctcaagccaggtttttctatctgagctgttctttcctgctgtatgcacaaagcagaagtatcacttctactgtcacccatattcttgatacaaggtttgtacagataactaataaaggattataaatcactttacatgtgtgcattttaatagaaatttgtaatacaaacgtagatgattatcagtactctcaccagcagcaaacactcacgggtttttcttttttccttaatatgttgcaagagcagacatcaaaattgctcaaagttcctctcctaatatctgcacgcagttcttaattataattaatttataggcctccaaggacagtgtgggcactgctgaaatccaaaccttttgaaacctgattctgattattaccatttggcagcagattagggcaattgtgtgtattggtttaacagcaaaatagcattttcaagtgttaataaaaattattggcttgtcactatctattaagagggggacgggcagtgaaaatgagcagatgataaaaggagaagcacaggagcagggcagcaggaaaatctcaactgggaaggagtcaaaggaagatactggaaggactacagagagcagggaataggggacagaccaccaaacctataggcatctacccagaaaacagtggtgttctgagctacagatgaacagcctgcactagaggagatttaaaagtaggagttatataggtaaacgtctgccatagtagtttcctgcagagatcaacccatcaccttggtattaagcccagcatccattagctattcttcctgatgctctctctcccccactccctccccaccccacaggccccagtgtgtatttttcccccattcatgtatccacgtgttctcatcgttcagctcccatttataagtttacctatgtaacaaacctgcacatcctgcatatgtaccccagaacttaaaataaaagttgaagaaaaaaaataaaataaaatgggcgggccctgtggctcacgcctttagtaatcccagcactgtgagaggccaaggtgggtggatcacgaggtcaagagatcgagaccatcctggctaacatggtgaaaccctgtctctaataaaaatacaaaaattagccgggcatggtggcgagcgcctgtagtcccagctacttgggaggctgaggcaggagaatcgcttgaacccaggaggtggaggttgcagtgagctgagatgtcgccactgcactccagcctggtgacagagcaagactctgtctcaaaagaaataaaaagtaaaaaataaaatgaaatgtaggtgtcgaagaaggctatttccaagccccaacccccaaaacaatctgctctgtagcccagacatattccaagccaccgcatccctccacaaagcctcttttgcaataataatcatgttgttttgtaatggagagagcaaagctttagagttaatggactcacttttaacatttagtcttaatttgctgtgcgatctttacctctctaactgcaagtcctttatctgcaaaatgtgagataactactgccttcacagaatcactgtgaagatcgattcatttgataaatgtttgttgaacattttccatgggccagggaacctgctaggagacaggatccaacacagaatgggaatgggatcctatctccaagcagccattagactagtggccaagacaaataaacaggaaattacagtatcatgtgagagggctgtgacagagcatgcccagtgctacctaagagatcaggagagtaatgagctaaggacgaacagataagtaggaaatagtagtgaaaacggcagattgaaattacaaaagtaataaaatatcatttagaagatccttataatcttttgaagaaagcaaggccctaaagtcaaaaagagctagaattgaaacctggctttgacacttatcttgggcgggggaaggaagagagtaacttaaattacctagacctcattttcttctttataaaatgggaattattatcctcaccttacagagttgttgtgaatattaaacaatttacttgaaagcatctagcacaatgcagttacctgatatttattcattgaatgtgaatatattctgttcagaggcagacaaggagcttctgttgactccaattacttagaaaggagtcaaagaacttctgccctcccacctccttccctggctttagcacaatttctactgaccttagaaataggttgttttaaaaagtctgtaagtgacaatctcatgggtaatgtaaacaatacttaaattctaatcccagggagagccagcacctacttcctcactccctccctcctaccagccaccaaatagccaccaaattttatacaactatcatattactgacatcagaatagtcacacgtcagatttggaatcaatatcttcaatcacaaagagtactggaaaggagtatagaagtacaggaaaggcagaagtcacactcactgcttttgctagtaacaaggcttttcttgcaaaccctaatgaaatgaggcagggactatgtcttatttatctatctccagtacttggcaaagcatgtggcataatggtaggtgcacaatgaacatttgttaatgacattaatgaatgaaccagaccaataatgagttgcaactctctaactccactgatcagaaacaaaggcactgttctaggtctttcatttctcaagggttattataacagaagggcaatacaataaacgccaatatcatttccaacttcttgatatatagggatcatttctaggtcaatgttgttagttggtaattgcctatgtatctggatgtatatttgtatgtgtaaatcaatgtttatatgagagttgcatgtgtgtgagctcaaattagccctctttcccttggtctctgagctataggatggttctgctgatggaacatggcacccaagtatgactcagacttcacctcagagccaaggtttaaaacaagcttttgagactatacctcaaagagagccctgtagctaggccagtgtcaatagggaacaaaagctgcattatttcagcttcctggttatcaggccaactataggtgcaatcacacatttcctaatataaatttccatcattattcctaccagtgtacatagttagccacacaactaagcataaccgaattgtgaacttgttaaaatccctctaacattacctgtgtaactgagcacctattcgaagcatttattataagttgaagctttactctttagttgttcttgccttcctcctctctctcctttctcccaaattataggatgggtagaataatggggtaggaggcacacagactgaggaaattgttaggccttgttacagttctaccactgacaagcctgtggctctatttcctgatctctgaaataagagaaatgaactggttcttgaagtctcttccagctttaaaattctgtgaattctggtcttccactcaccacttaagatctactctcaggccaggcgcagtggctcacacccataatcccagcattttgggaggcggaagcaggcggatcacttgaggtcaggagattgagaccatccaggctaacatggtgaaactgcgtctctactaaaaatacaaaaaattagctgggggtagtggcacacacctgtagtcccagctactcaggaggctgaggcaggagaattgcttgaacctgggaggcggaggttccaatgagccgagatcgcaccactgcactccagcctgggtgacagagcaagactctgtctcaaaaaaaaaaaaaaaaaaaaaaaaatctactgtctactccgctctgcgctaagccctgggaagcagacctgtttggactatatggtaaacttcccagtcgtccggtttccaggtgggtttcgccaatagacaacacaatcaggagatgagtaggaacaagaccaagacagggctatcgactcccccgacccacttccctttctgccactcactgtgggctggttgtatcacttgactgaaggtcacagcttccgctaagcaatcctctcctcatgactggctccatacagcctacttccagacttcagaaattgctcccaccttcctccttcggggccacgggtggtggtagctacacccagctgctactagctccaggatgccagttcatttcttgtggtttctgtgcactgtccacaccttggtaaatagccctttgactgaactatcttcaaattaaacaaattgagtgcggcttctgtgttctgctgtgactataaatgatacagattcctcctgagttccacaataatacctatgaggctttctttgattcaaagtggcgaaagcaagacctgaattctgccaccaccactccaccactgagtcgagtatggcctctcctgatgctactccctgcttatcctcaggccctgctgagcagcatcgtaagcagcaatggtctccaggtgcctggtcctcagcaaagaacagataaacagctgaagactatttcaagagaacaaccgtcgggagccagcattttgagaatgagaaatgtaaaagcactgggagtcagaaaaatatagcaagcaattattagaatgactacaaaataaaattcagagaaaggcagtgcattttcactcagggaaaatgtggtcattaaatgggactttgctgaagaaacaaattggttaatgaagccctaactttttattcttctctttgatttggtcggaatctgattcatgaaaaaattgagttttagaatcaatttttactgactatacaaattagaaaccaaagtataaggaaatacaatcatgcgtggcttaatgacagagctatgtcctaagaaatgcatcattaggcgacttcatcatggtgcaaacactatggagtgtatttacacaaagctcgatggtacagctattgcacacctaggccatatgggatagcctattactcctaggctacaaatctgtacagcatgttactgtactggatactgtaggcagttgtaacacagtggtaaggatttttgcatctaaatacatctaacatagaagatgtgcagtaacgatacagtattatgatcttacagaaccactgtcattatagggcacatgaccgtataacaacacaagaaaataaaaaggtgatattgcaaagaaatatataacgttaactttgtggtttttcttaatatgcagaaaagaaattagaattagtaaaaaaaaaaaaaaatgagaactgtttgtgaatcttttcctgtaacagtaataatatagttgcaatttggtcacccttcacatttcatagtgtttttgaaagcaagtagctgctctctctgaatccagcctcttgaccctgctagaatagcacatatatcaggcctgagtgaccatgtccaccatcgccataggaatggcaagggggacaggccggtacagtcagtgcctccttgtccatgccccactgaggccaaatggagctcctccctgacatgccggacacagctgcaggccaggccagaatccatgggcagaattctccaaaatcagataaagggagtacaatcaggatgtctgcaactctcccaccttaaattaaatgttgaaagctgaaaacttgacttacgacttcacacaccagcttctatccctctgtcctcaaaagtccaatgaaccaacatgtccttattgtgtgtccatctgtgagtcactgtaaagtgtgataaggagtcagaattcagccacaaggacctgacacccctgcacagaaaagcacacacactccccaacacaggactgtcagggccgcagagagggctaaggcagtataaagacaagggcacagggactgccctggccttgggtcctggagatgcctttattaggaagcagcttttgagctggactaaagagcaccgagggtatctgaggaaaggagccaaaatacaaaaatgaggctgccttaagtcagaaaacaagtgaggcacaaaacatattggggaatgagaacagcgtggcctggccaggagcaagagcccacggaaggaatgtttggagaaaagctgaaaaggcaagccaaggaattggggatgctcagctggcgctcggacttaacgctagagatgcaaccaaaaacaatggaagatcgggaggaagaggaacagatctcccatcgctaaatccattttatcctcagcttcctaggtgactgaaaccgcagctgcctctgagagctgtttaggaaatcagctaggctggcttattacagcatggaaattccttccctgcctcccaaaaacagcaaataagctgtcactgttgagaagtgaagaccccagtttataatgattaagaaactgaagtgcttaaaaataacattcaatgaagcgttttcaattgaaataatattcatggaaacagttttcttctctacacgaaaacttccctctgctcacatgaacctaagtacaatgaccctgggctactgcctgcaactgccctgtgtacagacgcctctcttcactcatctctagcccaagtcttccttcagctcttgccttcctgtttactgtgttcactctcatgctgtgcaaaggttgttccacagcctatttgagacctcgcatctggaggcagctttgtttcagttttcaaattctcttgccttgctttggctgacaaaggggtataaggttgtgtgtgtgtgtgtgtgtgcgcgtgcgcgcacgcatgtgcgcaggtgtgcatgcacatgtgcacacgagagtatgtataaaaaagataactttatttctattcattttgcctctcctactccatcctctttgttctattcctcaccttgtgtcttaaatctgtcttctctattcttaaaatatgttcatgaacaactccacttgccgctttttttctgctgttctaattttccctggttgtcctttacaagatttgtcacctgtttcttcccccattgcaccatccacctcaacacttaatctctccacatttccgtggcccactagcacctggcggtctccttcggcacctcttcctctactctcttcccttgcctgggccattctctcttgttcttcatcctgtctcttcagcgggtttcatttctagaccaggatataaccatgacccaccaatcccctgtcccccaactgagtcagtgactcaaaagttactcttccttaactagaagaaaggcctggtttcacacttttatccatctgcctagttgcctggcctcactgcaaggttgacccatctaaaacattttcacaagctcttcgcatgcccttgtcattttcgtttgtctaatatatattcaggcctaagtcaaaccctgctattttctctactttagcaccgaattctttcttcatcacccgatgcaatatcctaatattttccaacaaccatcttttctctggcttctcctctcattctacatcaaaatatctccattagaatcattttctcctgcttgccatactacactttccttcctctaaaacctgacatcttctctcctattctcctcttccctcaagaatctacatagagagatagtgatgtggcttgacaggaacatacctgattcagtctgagctctgcagagtttaatgagggaatcactaagcctttacctctgcacctcattaatcatctacaccttaaaatttactcattcttctatcatcctgtgcatatattcattcctacaccaactctctaaactgccatctgtcacctcaccgcagagtcaatatgagtctttcttacacaaatctcccggagatagatgaagaaataacgcagagataaactagtgacataagatacaaacatagtatatgtctcatttgccaagaggaagggacacagttcctgacctagaatgctcttgaagggtaggagattctgagtttatcaggagagctttcccaagagatctgtcctttggacaaaatggaactctggcagaggactagtgaagtgctcggaagctctctggaatttgtctggataaacggaaggcaccaaagcaggaattccccgtcaatcaagaggaggaaagagaagccaagtaagccataacaaacaaataaaaatttttttttcaaaattggcaaatatgatctattttttaaagaggcattgagaaatagtggaaaatccctggattcgagaaagatttactatgtgaccttaagcacatcatttagcctctctgaacctcagagaggctcatctctaaaatataagcaacaatgcctctttcacagcgttgtgagacttacgtgagaaaatgggtatgaaagcagtttaaaagttgaaagatactatgcaaatgtggaagcttgttattactaaatgggcctgacaaagacattattcatttatgtatacatcagtatgtaaattttaatttatgaaaatcttttaagatccagtttactgaggtacaatttgcatacattaaaattcacgcttttaagtttacagttctataggtttttgacaaatatatacagtatataaccaccaccataaccaagatataaaatatttccatcaccccaaatatttccgtgttcctttataatcaatcccttagccctctcctgtgtgtgacaatcactgatgtgatttctataatttgcttctcccagacatcctgtaaatggaataatactgcatgcagccttttgtgtctgactttcttcacctgacataatagctttggaaattcctcaatattgttgtgtgtatcagaacttcatcctttttattgctgagtaatattcctttgtatagatttatcacaatatgtttattgattcactgttgatggacattaaggggtgttaccacttttggtgatcatgaataaagctgctataatgttcacatatggtctgtagtgtggatatatgtttttgcttttcttaagtaggtacctgacagtgggattgctaaattattggttagagtactttaacatttatatttaattgccaaacttttccaaagtgactatcccattttgcattcccaccagcagtttctccacattcttaccattcctaccaacctattctttccaaagtcttgtgaatgttctttttttccttccttcttacctgcctttggtccttctttctttttgttaaatttcattcattttacttggtgttcagtggtagctcattgtagttttgagtcgaatctcctgccaactaatgatgtgaaaatttttttcaatgtttatttaccatcttatctcttctttagtagtgcttgttcacatcttctgtccactttgcaattgagttttcttgctattgagttgtgagagttctacacatattctagatatgtcctttatataaaatatgtattttataaatattttctcccattttgtggctgatcattttcttaacagtgcctttcaaaaaaagaagtttttgtttttatgaagtccagtgtaattaattttttcttttatagctcatacattttgtatatctagaaagtctttgcctaaacaaaggatataaagattttctcctgttttcctctaaaagatttttaatttcaagagttgtataattatagttctatgatacattttcagtttattaatcactttacatggcacaagctatgagtcgaggttcatttagggctgtatgtatgttttgcatatggatgtacaattgtttcagcatcattttctggaaagactgcccttcctccaccaccttgacacatttgtcaaaaatctacttgtggactcttttatgctattaccacactgtcttgactactgtgcttttgagtcttacagacaggcagtgtatgtcctgcaactttttaattccagaattgttttgcctttttggttttgccatgtaaattttagaatcagctgttaattcctacaaaaaaaaaatcctactgggagtttgactgtgtttttgttgaatctacaaaaatttaagaaacgtagacaccttaacaatattgagtcagatattttataaaatttatacctaagaatatcatgtttttgatgttactacaaatttcttaaatttcaatttctaattgttcattgataatatatatacaattaatttttgtatgaccatgtatcctgtgaccttactaaacatttattttagtagtttttgtgtgtgtgtattttttgctgctttctacatagacagtcatgttgcctgggagtaatgataattttttttctccttcctcttctttttctagtccaataacactggctaggacctccaataaaaatttttatagaactagtaacagagaacatccttatcttcttccttatcttaggggtagcatattcagtttttcagcattaaataggatattacctgtagggttttcatacctttgtcaagctgaggaagttcctttccgtttccagtttgatgaaattttttaaatcatgaatatgtgtgtgtatatatatacatatttttgtctttttcctttacaagaaatatttctttccactcttgcttcaagattcattctatgaacttggctgctcaaaaagtagagacttaagaagggagttgtgcacttaaattagcacatgtagtggttattttggttagagtttgagagattgagtgaaggatcacagaaagtaagaaacctcccaaagaggttatagctattcgtgtagaagataatcaggccataaaaaaatgctgcagacaagataatagatttgaaactgatgaggggtaaaacacagtaagatgtgaaaaaagttggagaggaaaattgtgcaaaagtgttccctacaccaaaatttgggagaagttagtggtgggaaacaatgtagaaaataagttctgtgtattttatatcaatttccagattttagcagtagtacataaaaatgcagaagttcctatagacaatgaaagacaaatattaaaccacaaaaaagagcagttagggtgaaaaatctgacttaagtgtcaactaaatgaagacattacaagaatgaaatctatctctaaattgagagtgcaagtatacattcctaagagatcttcctcactagccgggtgtggttagaagccctctaagaggaaccttttctccccgttaatgtgaaagatttcactctttcatctttcatgtccacttcatcctccatataaatgttcttcccctgtgttcttccctcactgcccctgcctataatccaaatcctggtccctctgtcactcaacccagtgctaccagcaatcaggtctgagaagcactggtaacaagatctacaggagcgcttaacaaggcttttatgtattggtttaggaatctaccaagcttcctaaaagaagtagtattctgaagttttaaataggagtctcataaactgactttcagaatacaacttgttcattagacaaagtattcatgcacagaaggaaataaaggtggtaacggtatatagcttagttgagagcacatatctaatgcagtgtttctcaaaataaaatctgcaagcaacctgcatcagaaacacctgagcacttggcaaaattggccaatatttaggcctgatcccaggccaggtgatgtggaacacctggagataaatttggaaatctacattttccacaagcgccccagatgacactgttgtgcactaaagagaagccctgattagaagagtgcaaaaaagccaattgtcccccaacccaatgcaccaagtacacacaagtctcagagcagtgtttttccaaatatgctcataactagcattttttaagggaatgaaatagaccagatcagttcacaccgtgttgtaaaggcaaagattattttcagtttaatatttaccggtgtatgtactggtttgatgttcaatgtatttcttaattggaaatgttttaaaagccatggttcatatagttcatacagaaattgcctccaaagaagcatcctatacatcatctgctcccacagttccatatcaccccacatgctctggctttgagctagggctgggtgcttgaccaagctcaaccaattaggaaaattggaacataaatgcctagaagctaaataagttagctgtgggcaatggacttttgaggccgactaaactgctgggttgagactatcatttggggtgatggattttgaacagaggagtattgatgaacaagcaggaagggccaggtggcaaagagaaacagaaatggcaccatctgagaagcaaagaatgagaagcagaaccgagttcccgcagccagcagggaaaggagacaaggagagcagctgcctggttcctgcagcctgcccaatactcacccaccaccctccccagttcctcttgagggccatactccttcctctataataaacctcctaatgcaagccagctccgggggtatcagtgtttcttaaccacatgtttagagtatgatgcttctacaatagaggttcacagaataaaccctcacccataaacacttatacagtactcatgtcacatgcacactccaagtgctttatatatagtaattcacttaatcttcacacaaccctatggggtagatgttattattagccctattagccccatttaacagacgaataaactgaagtacagaaaattcaagtaactaacccaaggttacatggctactaaatggaggagctaggatacaaaccgaggcagttatctctaatgcgcatgctcttaatcactaccctatatatcctctcagatgttaacataggaaaacaaattagatttcaagccaaaaattattacaaaaataagctgcaatgctttggagaaaccgttcaatgatacaggagaaacaaagacacaaatttttttaaaaagcacagatgtgaataaggggcttcttaaaactttttaataatttgtagtatttatacaggcaagtacaatcatataaatacatacattataaatgtacatgcagctcagtgaatttctattttaaaacccaccattcatatttttcaatacttttgtaattaggaagtgtagtaaaatcttcacaggaaaaaaaagttttctctatcctcaaaactgaaaaaaacccaaaagactaatacgtaggcatgggattacaaggcacagaattcaacagaactcatacaaaaggatcggcaaaagatagcatgaatggaagtagaaaaataaataaataaaaagaaatctaaacttctaacagaatgaatcaattcttagtcaaagtgacctgcttttagaatgctttggggatttatttcagtcttacttatacttacccactcatctaggacaagtaataattatggaaagtgagtaatgaagactgatggtttgtggatctcatgtattttatttctttggagcaatctcgaaaagaagagagggacaactgatgcctccatgggtgagtagctcttaggcatttacttctgaagcttgctttgcagccaggtattacatttacatagtgcttgccctctaaaatgggaagaaaactgtgtcatgtcctcaaatatatggtgacaatggctctatcttagtggctgtggacttagccccaggactgacgcagtgcacagtccaccttcagccacttctacaagcctgttggctcctctgtcctaattccaagtcagttgagcaaacaataaaacagctgaattggtatcagaaagagaaggcagagaaatgagaaagggaaagagaatgagtggaatggacagaatgtaaaaagaaacaattttgtttaacccaaaaaaatcaatatacggccatgtattgcttaacaacggggacacgccctgagaaatgtgttgttaagcaatttcatcattgtgtgaacatcacagagtgcacttccacaagccaagttggtatagcttactacacacctaggctctgtggtatagtctattgctcctcggctacgaacctgtatagcctgttactgtgctgaataccgtaggcacttgtaacacgatggtaagtatttgtatatctaaacacttctaaacattaaaaaggtgcagtataaatacagcataaaagataaaaaaaaaaaaataggccaggtgtggtggctcacaactgtaatcccagcactttgggagactgaggtgcgtggatcactggaggtcaggagttcaagaccagcctggccaatgtggtgaaaacccgtctctactaaaaatacaaaaattagccgggtgtggtggtgcactcctgtgatcccagctactcgggaggctgaggcaggagaatcacttgaactcgggaggtggaggttgtagagagccgagatcgcaccactgcattccagcctgggagagggagcaagactccatctcaaaaaaaaaaagaaatatcatatacagtataaaagattttttaaaacggtataaaagataaaaaaaaaaaaatggtatagggcacttaccacgaatggagcctgcagggactgaaagttgctctgagtgagtcagggagtgaatgtgaaggcctgggacattactgtacactactatagacttcataaacattgaatacttaggatacactaagtttatttttaagagtttcttcagtaataaattagcttactataacttttttactttataaacttctaaaattgcttaacttctgtctcttttgtaagacagctatagaaaatattttctttctgtatatcctcattctataagcttttttctattttaaaaattatttgttttggcttttagattttttgtcaataactgagacacaaacatatacattaggctagttctacacagaatcaaaatcattaagacgtcactaggcaataggaatttcttagctccattatcatcttatgggaccaccgtcaaatatgtggtccattgtacacgtggtccatcattgaccaaaacatcattatgcagcagcacacaattgtacattacatatctaggcacataaaacaattttgccatctactgattaagcttgagataggacatataaaatgcttttatatctgagtctactgaagaaattttaagtaagcacaatataattacccagcttaataacagttagtgcttcatctgccaactattttataacctttacctaattaattttcacaaaacctctgcaaggtatgcatgtattaaatacccattttgtaaatggacaaatcacgagcaagaggttaagtgactaccttaaaatgaataaaaaggctagcatgtggaatcagaaggtgaactgtagtaaaatatttctgttccccaagaccatgccaaactcattttcccccgaaactatcatgctgtcaacctcctggcattatggaatggcagcaaggatggattttcgcactggcaaaattggcatacacctgtctttcattcaaatgacaaaaagcagtacaattttcacaagtagatctgagcccaggaagctaacacgctcaatggtaacagatacagagatgtacaatcagggaaacaatcctccccttcagtgaccgtcattctccagccttgctgctcagaggatttcatcttgcctagacttctaagaaaagcctgatcaaaacaataggctggcaccctccagttagtgaggatcgaaactgtcttcctgctctaattttgtcctccctgtactgagaggatgtgagtccctgctgtccacaagacgtcagccttcctttcagcccctgctgggctgaccctgactatatggctggcctatctcgtttcatggacaataaacattcaggacgttgtttcaacacagatgaagaatgggtgtcctttcctggatgttttgccactccttacaaaatcactgccccctccagtaattttctcttgccctatctctctgttctttttggttttaacatcctgtgaagtctgcccacctatctaccgcctctagtaagcaaactacatcagggattcctcaaatctaaatctcttactgattgctctataggttctgaaagccatattggggatctgtaagctgcagagcctaaacagcatctcaaaatctgatcgtttgcggaggactggaggacaggtaccaccactaccccatgcgcccagtggcagcactagaatttctattcaggagaggttcagtggcagcaatctggttggagaagaaaaccaggggacttggtatagagtagcatttccatagctcacactatttttacttagtgtatatatttcttgagaagaaggggtgcttcacgaaggcttgttgacagtatgggattatatgtttctcccacgacaccccttgtcttattgctgtcccttgaaccagcttaggcacttagatctctaggattgaacatggaagggcccatgaaattaaattcctggtctgcagtctggaaacagtgtgattcctgctcagcttcagagaaggcagagtcctttgagcaccatgcagactttccaccctgggagacaggtagtgccctgggtatcacaactttgaggctgcaaagtccagtgggcccggaacccatctgagcaggtttcctctgcagatgaggcctcttaaggcaatggcttttccaatcttacacattagccaagccagccaatctccgctccctatcagtattagtgatgcagagccaccttcagctgattgccatctttcatcttctgaaatgtgatttttaaatatgttacgtatttcatttgtgcaatgccctggatactggattggaacacaattgcagcagattacactatttattttacatacttgaagacagagcctcttgaactcaatatgcaaatgcatgtgaataatatgcaaatctgtgttttctgccaagactctggcatttttcttttaatgggactgtgattcctattcaagaaggaagaacatcttccttgcatccccctgcaccaatgttctccccctcctcccttcaaggtcctgaccagcttgtaacttcactaagtttcaaagccctgaaaaaattacaggctccactgaattccatttaaacctataatggtcattgtaaggcattgtttagtgcatatctatagatgtgccaccaatgcaatgaggttcacaccatctaactgccaatttggaattttattcttaacctcatggttaagactgtcagcagtctgcttaataagtctaaatttaaatgttctcacctactgtacaaatgtggccacacaacctttctaatgaaaaaaaaaatgcagtttacaaagctttttaaagtgaaatttaccatggtgctggcaaaaggtgtcagactggcaactgcaaaattgaatcctctatttagccttagaatggtgaattataggtatcttacaaatgctgcctgcaccatcaccattatgatcaccatcgtcaacaccaaagccacaaaaagcccaagaggtgctcagacccagaagaagctactgaagaagccaatcaaattcaaaaattatttacctactatgtaaaaggcactcttctaagttgtcttaaatataaacataagacaagccttgccctttagaagcatacatctaataaaaatgatggcaataactaatattgccttagcacttcttttacaccaggcaccatgctccatcactcagcctgggacatgtcatttgatcctcatgacaatcatacttgcccaggattctacagttaataaatgacggaggctaaattcaaagaaaccaccctagtgactcatgaataaataactgttgaagtgaaatgaattgaaatttcataggtgaaacacaaccgtcccaaagaaccaaggtgagatccttaaattaaaaccttctcataataggttttcattcagggccataatgacagaagggaagaaaaaaaccagaagtcccatctcccaatggccgagttctaatttgtattttatgcttatatgtcaaatccaatataatgtccttacagttttccagtcttggtccttttataaagaatattattttaaaaaaactatttcaaattctcataatgaaatatcacacaggctagatttatcctccctatgctgggagtggaataaatgagattccctaagtgatccagggggccagtgagcacccaagattcctggataccataagctgaaacagggcgcaggccagaatgaaactaaactcccattgtctctaatctccaacagcttgcttattccacttagctttgcagaagtggtggaggtgaggcagagactgccaccttagagaaagacacctctccttgtaaatacaaaacagtctcctaagctttgtggtatatgagaataacacgggggcctaaactaccaacaaaagtcccaagagctaactgcagcccacataaatcacatcgttcccttgaggactttgagagagtgaaggttatctacttagcctcctaggaagatataagatttaagaaactgtagagaatgaatcctataaagcttgttctaaacgtgaattcacctgactccctgaaagaacattctctttcatggaacaagtgggttcaaagcacagagtaagcagtcatcagggatgagaacctgaagtcagaactgaatgatgacctgaccaaaaccatccctgtgaccccttgagaatcatttagttagctctagattttgttcagtattcaaattgacttgcttagcattgatcaatgactagcacttggcccattatctaagtaaatttgattaaattgttttgaacagcctttgaattacatctaaacagccatattttagaatagtaaacatgctctatttcaccactgttatcaataaaatattcatagggcttacatacacattgatttctaatcatatggccaactactgaagaagcatgtgtttctatttttcctgtgctggtgaaaaatgatgcagaagacagatagtggaggggagggggtagcagaaaacattaaaaactaatacttccaaaaaaggttttaataaaatagaaaaatccttaaattgtcatatcaaaggaaaagaacatgaaaaattatgattccaaatcaaataatccacatacaaaagtaggaagaaatataccaaaatattggatgataaatgttcataaattatttgtttaatcattattaactaatgccaaatcagaaaaacttaagacttgagaccccacagtgacctggaaatctgtgaaaagatagacaaacgtgaatctcacttttatttaatagatatgtgcctcaaaagctaaacataaaactcaaatctataaatgtattccacagatatttgaaagccatctactcaaaagcacataacttactattttaaacaatgatttcgaagaactgatacaggaaaataaaatcagccaagaatgagcaaaaaagggaacttaaagtgactttttttaaaaaaaagaagggggcttgcatttatctgatttataaatggatgacacagaattatgttcacaactataataaagaatttaaaatatactgtagatatgagcagaaaattcacaaaagagaaaccacaatgaagaaacctggaaaattgtccgatattactcataattacagaaataaaaacacagcggtggagtgtaatttttacctaccaaatcataaagattttttatttagattttagaggggggtggccaaggacatggtgaaacacagcactctcacatattactacagtgaatataaattgatacaaaccattttagaaaagccatttggcattacagatcaagagctttaaaaatgtgcatacctttgaccccgtaattcaatttctgggaatctttcctaaagaaataatgtaaaatacaggcagaaaaagctttatataccaaaatgttcattgcaacatcatttataatagtgaaaaatggaaagtaattaaatggccgacagtaagaaggtggttaagtaaattgtgctatagctttatgacagaatgctaagtagcctaaaaaaattatgtttaccaagagatttcaataacatagaaaaatctgtatgctgtgatgcttaattttaaaaagagcaccaaaaaacggtgtgatttcatctattttaaaatgcatagaaaaatgctggaaggaaataacagaacattagcagcaattgtctttgttagaattcgagtgacttttttttctgtcaacttttctattttttttccaaatatcccacaatgaacttatgttatttttataatcagaaaaaattattaaagttatatgttaaacattgcttaagtatatataccagtcgatagacaaaggaagaataatacaactgaaatgagacagagaaacagattaatggagaatcaaccacttcctgtctccttttaggtaatgccactaaatttttaaggctgtgttgtaatttagcaattactagcatatgaaatatttactccattagttggataaaattaagtgcctaaatctgtctagggtcacatatttcccagtcttgactgaaaggaaccatacaatgaatcattttggaaagaatcatttctgtaaagtaagagtcatgatctaagtttgagttatcacatttatttaaagtgctgcaccctcatttgtgtgtatataaaggcatatgtactttgtgtaatttttgtgaatgtgtgcacattgtgtaaatatatatgcatgaatattagagcaactaagacttgaatggtttgattcagttcaacctcctccttcaacagatgaagaaactgaggtccaaagaaatcatgaggtcaaagaacttgctcaggatcacttggctggccagtggcaaagccggtctgagaggttttccactaatttatattgccacatttacacccagcattatgactgtaagaagctggaaaattgagataaagttgcagtaacatccaactcttaccctacgcaggaaataatcactttcactttaaccattttgtatgttccttcattaaagggacttgaaaaagcagttggaagtatgtggctgagcccttagatatgtatgtgactgtcctggtggtcactaatatctcaattagcagaataaactgaaagtagaggctaaagcacgtctgttttgttagtgttttaagatcaaaacaggtctttccaaagtttgaaaggctaagaatttcagaagttcttgagaaatgacagaaaagtgggttaataatgtaaacggaactctccagataataaatattttactgttcttgtacaacattaggctagctatccctgctttgcaattcttgcttgctgtgattagcatatgtaaagtttttcaaggtgacttattaagcttattatctaggactttagaaaaagttttggaatgtagatctttagatcttttcatgctatgtgagctcctctaacttcaagttctaatgaggtgtgtgttggctcttttttaagagtcctgtgcctattaatcatggtactatggtatgtggcagaggttaagtcatgacttaaaacactttgcagaataactaaactccctttatatctgataggcttttaccaaatacatgtgtgcatacgatagtatatcatatatatcctatattaatctatactatttcaacaaattcactatgcaaatattttctacatatactaactcaatgttgataacaaaatagaaaataaagtacacaaacagaggatcgcagtgtgatttcagaggagagattaggtttaacagaaggctctaccaacgaggaggctcctttaactggcaataaactcaaagctgagaacagcaggatcacaccaggggaaatgagtaatagtgaggaagatggggacaggagtgcagagctgacaaagcgaaggtgcaggatgagcttggctatgacaagtccacggaggattgtaattaaagatcaagacagccatttggaatagactcaagaagaggatagggtgtccactgaaaagagcaaagcgatgggttagtccttcagaaggtctgcagtattaccactggccagtgagggcatgcaaagcatccaaaggaagcaaaaaatggacgattaaagggaacgatcattaaggccatagtggcgcctgtaacgtttgaaacatgtctccaaaatgaatataatgtacaactacatggcaatgatctccttaagtcactacaaaactccattccattttttaaaataatactcatatgatgatctcacagctctgtggacagtaaagtccttgaaaaagaaaagctcagaatacaaaatgtgttgggggattggggagggcctttgggtatttaaacatgaagaatattattgttttatgagcaagttaattatatgcaatacagttcactatgtagcaagcactaccgacagagctagtgtggctttcacatgcactagctgggtgaccttgagtaagctgtttaaactttctaagccacagtattctcatctgtaaaatggtaagaataatatctaccttgcagaactcttgtgagaattaaatgagataatgtatgtaaagcaactcagaaagatgcctggaacatctgccccataatagatactagttatgataatgattatgatgaggatgttacttaaaatattgcaaacattcaaaatcctccttctctcgcccttttcaattaccctaaaaggaagcatcgttctgccactccccctcctactcgcaacgcatcgataaatggacaagaactaggaaaagcctgatgtgttagaaaagtttctcaccaactcagcatatttcctcagaacttctcagttcagtcagcctcactcacgcggggagactagggcccagcctagctagagccccactgcagcacctgtccaaattaccccatcacttactccattagcacactctaaataaaagactccccagccctgcccctgcttcaccggtaaagccaaaatctaccaatgagcaggctccagggagagaaatcttactgtgtgataaagagcaccagaagagcatcagcttagagagactcccaaatcctccatatttgacagagtacagatttacacctttacctaaagaaaggtctcctaagccttccacattctatttcaatctgtagaaaatgtgggttctcccaatgagtcgagagcccttagactcttagaagtaactagctatgagatctcaggcaggacacttatccctctgggccctgggattccccgctagaaaataagaatgttgtattaggtaatcttaaaggtcttttctggaaataacagcctatgaatctttaaatatcattttaaaaattacatcaataaagcagaaagagatggatgaatagatatttagataatgataaatagatgatagatatataatgaaagcatgtttttattgggaaagtcataataattgaatgactcaatgatttcattctactagaaaattttatatcctgggcccagattatcttaataacttggtccttattgtctaccctcccaatatgtaactaacctgtacattctgcacatgtaccctaaaacttaaagtataataataaataaataaataaataaataaataaataaataaaaaagaaagggctacctttatacagcactagctctatcaacaaggcttattgttaatgaggaaaagagaggtggaaaagaaacaatgacagtgaatatagacaggggttaagtgtgttactctcctctttctaagcaaaacaaatccacaggctgcaaatgggaactattagggtctgacactgatctggaggggttttccgagtcattatttctatctagcttcttatattattgattaatagaactagggaaataataatgtcatttattgagtatttaagtatgtgccagccactatgctgtgtgatttacacatataactgcatttaataatcaaagcagagacaagttactagccaaagaccacacaactaataaatggcagagtaaggatttgaacccaggcttgcctgattctcaggctagtgcttttaaccacaggcacttctcttagttgacattgtatgaccactatgtggccagatcatcccacttgctggatgtgggagaatgcaagaggaagaacacaagtgtggttcttccttgtctgcctgttacatttcctggcacattctctagtgcaaaaaatgacgacaactgggctgggcacggtggctcatgcctgtaatcccagcactttaggaggccaaggcgggtgtatcacctgaggtcaggagtttgagaccagcctgaccgacatggagaaaccccatctctactaaaaatacaaaattagctaggcgtggcagcacatgcctgtaatcccagctactcaggaggctgaggcagaagaattgcttgaacccaggaggcggaggttgcagtgagccgagattgtgccattgcactccgtgggcaacaagagcaaaactccgtctcaaaaataataataatagcaacaactattactactaccactattacaactactaccactaccaattactgagaattatgttttgtcagatactgtgcttggtttccataagaattcctttccccattttacagatgagaaaacttgaaattctaagaggccaataagtcaggtcaatctagcttataaaccggagataaatttagaacctaacactgtcttacacaactcaaaatatattatgaaagatttgaattctggaatcaagaccacattaattaaattaacataggagactaacttgtgcaaagccccctattgttttgaagtcaaaaaaacaaaaacaaaaacaaacaaacgaaagaaagaaaacaaagcacacagcttctttaaattggaaaaacagcccttaaagaaaaaaaaaagactgggtaatgttcaataaaaataagacaagacactatgatctggcaaaaggaagtgggtcagtgtcaagttgaagagtgtttaatcgtagggcaatcggggaggtaccttatgtaagccatgttcaacccaaatgaaaatgaaaataggcagcaatgtccagaggggtgttgtctcctcttggcccaggcatttttgttaggcacacagcatagtagtaaaaagtaactgacacacattaaggaacacattaacattaaatctgattatttcctatgtcaaaataataatttaaaccaaataattcattgtaattaaataagtcaaagggggacattgccaactatccacttcctgttagctagcatacacaaagaagagcatgttaagatgttggaaacttttcttattttgtctgatactaaaacctatgaagacgtagctatggccatgctttttttagagaaatccacagatgtgctttatagaagacagtatatgtacaaatttttttaattgaggaataatttcaccatagtctttgagtctatgatgatctcacatgctatatctctaagctgtataacagccttatatcctaccagctcccctaaaggacacccacatattattcataggctccaaacaggcatattttaccactcccatgtggttttcatgatgttcccatcttaggatgatctttctctttctctatttgttaaatctattcatatttcaagaacactctcaaatatccttcctctacaagttcttttcatatcaactcaagaaaatataagcagcttagagcttcccttcttcatcattgtggaatatacatataaaaagttaataaggccgggcacggtggctcatgcctgtaatcccagcactttaggaggccaaggagggtggatcacctgaggtcaggagttcgagaccagcctgaccaatgtggagaaaccccgtctcgactgaaaatacaaaaaattagctggtcatggtggtggacgcctataatcccagctacacaggaggccaaggcaggagaatcacttgaacccaggaagcggaggttgcagtgagcagagatcacgccattgcactccagcctgggcaacaacagtgaaactccatctcaaaaaaaaaaaaagttaataaaacatttatgcacattgttccaaattctgaagcaaatacttccataactatcacccagattaaagaatccataagcgtccaaaaatgtccctgtgtgcccttcccatattataaccttctccctcaccagtgcaggaaacccccattgagtactataatcatattctgagtattatcatcgtattcttccttttctttgtaattttcacataatgacacatccctaaacagtatgttcagttgtttgttttagaacattacgtggatagaatcacttagaatcataccatatgtattatttcccctcttgcttcttttactctatagcatacttctgagatttggccatgttgttgggagcagctgcggttcatttaccttaattgctatgtactgttccactttatgattaaacttcaacttctttatctacattagaatgtagataagacctttgggttgattccaacttggggcaattctgacatgtctattcttgtccaagaatcctagtacaataataactgaagttctctaagattcaaatttaatagataacgccaaacaattttttcaaattgggccaattaaatttccacaagcagtgtagaagtattcctcttctacattctcaccaacattcagtattgccaagtttaaacaatgttttaaccaatcagttgagtatatatcggcaatttatagtggttttcatttgcattcctttgcttcctaatgaggttgaacatcttttcatatgtttattggccacttagacatcttcttctgggaaaggcctatttgtccactttaccactgatttatcttttttattattactcatttatacaagaatattcatttctttatacattatggatactttaaacagatataaatgaatataacttaaagaaactaccctgtatatattttggatatatatttctttataaaatctaaatcagtgttgtctatctaatatggtatccagtagccacttgtggctattgagcatttgaaatgtggctagtgagaataaagaagcattttttaaattaaattaaacctaatttaatttaaataggcgtatgtaatactggctaccgtcttagacagtataatagtaaatatgagtcttgtcagctacgtatcttataaatatattttcccactctgtgatctgttttttcattatctttttggtataatttgacaaataaaagactttaagtttaatatagttgaatttatcaatctcatcttttatttttagaagtattttgctttatacacaaaaaatttccctactccaacttcaagttcatgagatattcctatagtctctgtattttacctttcacatttatatctcaaataaatttttgtatatgctgtgaggtgagaaatgtattttttatacagatatcaaattttttcagcattagttattaaaaagtctatctttttccaccaatctgccatgcccttctattatttatcaagtgactataaaagtggggctctgttttggaagttttctattccatttcattgatatatttgtatacccttgcaaaaatgttacaccattcagctttaaaataatccaatctgataattattttttaattggagcaattttagttaatgtaatgtaaaataaatcttgatatctggtaaagcaatttttcccatcgtattctttctctttaagtgtcttagctgtttgcaatttcaagttaattttacaatctatttgttaaattctgaaaaaaaatctgccgcatattaatttcaattaaattgaatcttacatcgtttagggggcaagttaataattttaaaatgcagtttttcagtatgtaaatatagcatttcctttcatctacttcaattcataatgctttacattattttttggtctttgcagatacattttaaaaaatgaaccaaaaaaacaaaacaaaaaactaaggattatcatctcttttttcattttctgaagagtttgtgtaagagtatactttttcgccgggcatggtggctcatgccgataatcctagcactttgggaggccaaggtgggcagattacctgaggtcgagaattcgagaccagcctggccaacctagtgaaaccccgtctctactgaaaatacaaaaattagccaggtgtggtggcctgcgcctgtaatctcacctactcagaaggctgaggcaggagaatcacttgaacccgggaggctgaggttgcagtgagctgagatcagccattgcactccaacctgggccacaagagcaagactccctctcaaataataataaaaataataatttttctttctttaatggttgccaagacttgccaatgaagctaactaagcctggcacacttttttagaaagatttctattactaataattaaatgttaaaatgatcataatctttgagttttctatttatttgtaaatcaatattggtgagttatattctccaataatttttctatttcaactaatttttttaattcatcaacataaaattttataatgatttcttacctctttatttcatgtagcacttctagtgatatccccatttttcttccttaaaccatttgtaccttatattattttgtgttgaccagccttaccagacatttgtaaatgtataagtttaaaaaaaactttacgtttcatgaatactttgcaatatatgtttatcataaatttcttttattcttactctcatcttgatcatttccttcctttcgtactcttttaattttattctcctcctaacttcatgagacagatgtctagtttatttttcagtctttcttttttaaaatataagctataaagaccataaatttctgtctaaggattgttttatctgcaacctacatataatgatatgtagcattttagttattgttcaattcgaaatagtttctaaacttctattatgatttcatctttaacacgagttatttatccaaaacatatgagatttgctagttgtccttttgctttttacttatagctaaattgcacttcgatcaggaagaacaaggtcttcctggccttaatttcagtccctttgaaattcactgagatgtaatttaagttttgataaatggtcagtttcctaaatgttccatatatgtttgaaataaaagtaatatttggtagctttttactagagtgttctgtatttaccttttcatgtcaagtttgttaatcatattaatcgaatctcctatatccatatcagtaactgagagaagtatttttaaaacctcctatcataatcatgaatatttttatttctcattatacaactgttaactttgatattatatactttgagatttgctactaggttcatataatctaagatgtttacattataatctaaaatatttaatcaattcaagtgaccaatctgtctgaagtctattttatctgatgttaatataggtatattagtgttattttgactaatatttgcatggcatctgtttttccaactttgtatagtcactcagtaccattatgttttagatatgtcacttataaacagaatattatttttaatacaatatgaaaatgattttgtaatttcagcatttttagttagtgtaattattgggcttaaatttatcaccttattttgtgttttctatttgttccacacctcctctgtttcttcttctttctctctttctttcctttctttacaatgactgaatattttatcattttttatttccaatctgctaattgtaaattctacacttggtttctggtgtcttagtgattgtcctagaaattaaaatatgtctacttaatttatcaaagtttagagttaattcatatcattacccttctttcagaaaatacaagcatcttaggacactttaaccccattaaccttcctgcctaatttatacgtacacttttgttgtcattatttttcttacttttaattgcatcactattagtcatctttatctttttgcaaatggctaataatcatttagtttcccattttctactccacttgctcttcactccatcttgcatctcagacatttcatcttgggcttatgttcattagaatatcgtttactgaaggtttgctggtgttcaaaattctagtttttatttttccaaatctttaaaacttttatttcattctaaaagacattttcactggtgtaaaattctaaggtgtcagttattttcttttgacacataaattttctacaatgtcctggcttttgttgttcttgagaagtcaggagttcatctgcctatcatttctcaaaaataatcttccattattctataacttcttttaagatattctctacttagctgattttctgctataatattatgatataattttgaggcagaaaccattttgagatataaatgttacatacatttatttatgtttcttagtgcttattgggccttttgaatctgtagatttgactttttcttcttgtagatctgttcatttataactataggtagataaacagagatattttgaggccatgtttttaagtatgtacaaattcaaaattgttacatagttctggtagaataaactttttctcatgaggatgtgatcatggaaaattctacagcattatttcttcggatatattttttctgcctattttctctcaccactctgattatatgcatggaagacagtggggaaggtctctccctgctgccttctggaaaattcttcagactcctcatccagttcactaattctctctttagctctatacaaatcagctgctagatcaatcagatgagcttttattacactttcagttattttctgttcctagaagttttagttggctcttttacaaatcttcaaaaatactttttgcgctttcctggttcctggagatatttttaagcttcccttttatttatttaaatgtggtaagtatagttgtttcatactatatgccaataattccaaagtctggagaatgtgctgatctgtttctgcactctgttgtttcctctggttttctttgactatactattcactacccttgaaaatgaaggagtggggaggtggttcccggcagtctaggacgtcttccttaaagaagttttgcatttgcttctgccaggtgcttaaaagaactacagaccgagaaccatctcaaactaaattcactgctggagggttcttcaccattcatttatgcaaatatagcttacaagtattctgacgagctgagagccagaaacttctcagggatagggtcttgttttttgttgttgttttcttcactttcccatccccagccccgttctgctcagcctcaaggacgctctccataaaattgcctgtgcatataatcacaggttatttctggttctgagagtccagcttaatatgggagggtttccctaggctccccgcttgggttgagtcccaagatttggttctgccctcttctgccaggccatgaaaagtgcagcttaattatcagcaaataccgttgggtaaacagagctcccaatacttttcttggatttcagcatcatgatgccttatcttcttatagcaatttgatggtttcagacatccttttattgacattttaatttgtttttagcagagggttgggctaaatagccacacagccatattctcagaaatgaatggtcttttttatgcctctgtcacttaacatactccatcttgtacctggccccctaactacaagtaaacccataaatccacaggtagtcaggacctaacctcttgtcctcctatgtcaaagcttaaagtacactgagcactaaagggcaattcttgtaccacttttccatctcctctcatatccttattttacagttttgctgtattcaatcaattgcaagaacaactttttgagtttcaataacaatagggttgtagagagacaatgtctcacttgatctagagataaatggttataccctagaaaatgtgtggttttcacacatttcatgtaggtagtgtatgtctccttatgaatatgtttgtgtgtgtaagaaagagagaaaaagagaatgtaagtgtttaagatttaatcagacaaaatcaattccattttgttatacacagcacttcatgtcttacattaatgaacatgatgacaatgatttccttaactggacaacaagaacaaactgctctagcaatgtcattgtcaaaatgtgtataaaatccaagaagccaggccattaatgaataggattaatttgtatcatattaatttgaaattttagtatttaatataatgtaatttataaaaattcacattttctatgtataattcagacactatgtgcatgactcttactgagaataatgtttgcaacagatttatctctatgaagatacagcatactaggttacttagccattagttaaaactatgcagattacttaatatcttctggtgtcagatgtttcacataaatcaaatgatatggacatgaagctttgtaagattcctcccagcctcacaatttccaaaaatttatttgtagtaaaataattcattctaaatgtaaagcaatctagataaaaaaagtctttgcataaactcattatatacaacaatatgaaagaatctcataggtaagatgctaagaaaaagcctccagagggccgggcgtggtggctcatgcctgtaatccccatactttgggagtccaagatggatggatcacttgaggtccacagttcgagaccagtctggccaacatggtgaaacctgtctctactaacaatacaaaaattagcagggcgtggtggcacacacctgtagtcccagctactctggaggctgagacacgagaattgcttgagaccgtgaggcagagagcctgcagtgagctgagatcactccactgcacctcagcctaggcaacagagtgagactctgtctcaggaaaaaaaaaaaaaaaagtcctccagacacaagagtactattgcttgattccctttattatcacgttcaagaacaggcaaaatttatctcaggttgacagaagtctgaatagtggttataacataacagggaatggtattgactggaaatgggcatgaagaaactgatttgttggaaatgttttatatttttatctgtttagtggttatatggatgttatacatatgaaaaaattcatcaagctgtatatttgagatgagtgaagtttgctgtgtgtatgttatacctcaatttttttaaaaaaaagtatatgaacaagagctcaagacatggcaaattacagatttaattatttcaatgtttcttaaaattcaggataaaataattcatctttttctttaaaagagtgtccatgaatggcattttacttactactaccctaagtgccttaattggaaatgcatacagtattttaaaatcctaaaactgcatttttttattttaaaaagtcctaattcaacttttcagcagggcagaatggcatcctcacccatcctacaccataccccagttattttgaactcatgacgctctgcactgtatactttttcctaaacatcacaggaatatctatgccattcaagttattctgaaagctaagccttctcagtcctccaaccatctctatcatccaagaaaaaactgagaaaatcacacatatatatttcaatgaactacatatttgaaaaaaaaaacagaaaagaacatatagtgctcagttataatgggaaatcctggaaactgttgttaaacatgtatactatcttgagacaattgagactgttaatagttgccagcattatccctgtgagcatcatgctaagagcatggttagctgatgtatggcatcagctaaccataacaattcatgagttaaatactaatattgtcccatattacagatgaggaaactaaagattaaaagagtttttaaaaatgtacccaagttgatatggctagtaactagcagatgatggatttaaattcaggaagcctgatctcagagcaaaattcttaactatcacacccgaaagttcttccttataatgagttgaactctgtctccctctaccttgcacctgatctttgaggagacatagaacaatgttaatctccttccctacaacatttcaaatacatgaaggcaactgtcatgccctgccctgaacctctctactcaagttaaataacactacttccttcaacaggtttttctacaactcgtttcaagtcatctccccttgcttgagacatctcacaaaacacacaccagtatattcagtgattgcatggtattgaagaaagtatatttcaaagtggtctgataagtgcataacacgaagcacactgctgcactgctccagaagggaagagccactatcatggaatctagaaatgtttggtaaagagtggagtgacccgaagaaggagtcctgggattgtgtgtccaccatgctcactataaatggctgctggctcgtactctgtaacaaacgcaggctccaaaaaaatgacatgaatatactttcttctctccttctgccttccacaagctcatcaaagccaatgatcctcggacagcacaaagggcaaaattttggagctccaaattccacagctcaggcaggccatgttacagagggcttcatttaaagttgacttactactgcttacatgtatagaagatcatatgctaagccaggactggttgtgagaataaccgcagcaaagaaagatgaacactaccattcatgagagcttgtctttggtaaggactacctggattcatcccagggtgtttaaaagtctattgtttatgttgaatggtcagtaataacagcaccttcaggttagtacctcgggatagggccgtgtgtcctagtgacgtagaacctgaatgtacgggagggcaggaaataatgagcactgttcttaaatccagtgaaactttctgatcaggcttattaaaatctcagggaaaaatatcaactgggtgtatcataacagacacaggtaccacatggtctggtgcccagcactaatgcactgtgaaagcagattgcatccagcggcctgacggctgacacttcacttgtccttaaaatgggacaaagactagaaagactcgggaagaaaaaggataagaaagtgccttaaggtgtgaaggaatatctagcagcaataaaggtaaatgtgacgaggaagtaaatagagagaaaagggtgctgtaaatcacagacaaatgagtggtggctgtcccgacttatgcaagtatcaggaaagagaggagggacctgaattagaaaatattaagcatcattgtaaaagttcttgtttctaaagacaggtcatcagagattatggaacaacaaagaaatactacctcctacagttttagaaacaatctccaattaagccaactaaaatatttacctagacaaactaagagcagaagccacttagatatttcaggaatgggcttgactatgttcaaaagttcaaataattaagattttcttataaaatttaatcttagccaaattgcttccaaacctggttatttcattactgacaaatataataatgttcctggggctcagatcttattactattaaatacttattaagtatccctggtgtgctgaatgatgcacattacagatggatgaatatgttgtgtgcgccctccctcgaagagcatagagtcttataaaactgataggacacacacataaacacccccaaatttcttccaggggatatttagagtatttgcaagaatctatgtctctaaaatgccttggtgttaggttcctggatgaaaatggacccacacttgcctgatgaaatgggcaaaacacatggacaagattatgctagcaataggcagccttctcttgctttctctctggtttcaaagaaggtgcagcccctcctgtccatagctaatcctttgacgcaagtcctccttcctcttcctctctttgccactgctttggctaaggtcttcatcttttctggccaggattattgcaaaggtctctaaatgagctctgccaccaattcacattgctctaagcaacactgccgcacaccatttcccaaggaaattttttgttataaaatataaacctcactgtgtcattcctctgtttaaagattcttcagtggattcctgcagctctgaggatatagttcaaattaatcctttagcatgactgaaaatgatcattgtggtttgcatctttcatagatttttactttcatctcatggcatctctcaggaacccatttataccaaaccaattgccctttacttcaaggtttccaaatctgtcatgcttgtttgcatctccatacccccgctttcacactgatgggtgtctggaatatcctttccttctctccttgtctagccatcaaacttcagtttacacatcacccttacgtaaaagatattttccaaccctttctgcatctccctggaccaggccctttctcttctcctatagaccccctagatacctctactgtcgcacctactaccatagtgagtcttatcatctcctcaactagacatgaactcctttggaaaaaagactgtacctaattcatttttgtatctcgaacatttagcacagaatttacaagaaaaaaaaataaaggataatgagccaagcagaataagatgatagttttgaataagaaatgaacgaatgatgacataggtgcttcagccagaggggactgtacagaaggatcagatgtcagatctgtgcacatcaagccttgctagaagtcaggggcaaggatgtggaggtctggagaagtaagcaacaagaaggcctcgtcaacgaaagcaagtgagcctcagaagtctgctctgagctcaccacttggcaaacaggaacaacccccagcctctgcagtttgtgtcaatactcattattcttcacatacttctccttggctacctgtttaccccaggcaataaatcaaaatcatgtcttctgtctttctggtgggtcccttttcttctatggctttgaaggaaaaagatttcttctccctcccttttccacgaatcatgatctagacctcggggtctccctccagcctagtacgtacacacgcaccctcaaaatgaccaggcggcatgaaagattccacaggggtgctgtggtccagccctcgcagaaggtggatgaccgcagacacataggggaaggtattcaaatacctgctcacttcggtctctttcattctctgccttctctgtttttttccaacccctcacactatttcttctacgaagaaagcatttagcaagaaaacggcaggcttgattgcctctgccatcagtgcagcaaagctttgccgtactgtgcgtgcagtgcggagagacagagatgaaagcagccacactcggggccagggaatgagtgactagtgcgcacaaattaaccaagcccctcagaactcgcctactgcctcttccctcagcaactgcaccttacacagggaggagctgctaccctgaaagggcactctgctgtagacggttccttagtgcttcccaccccaggaagcatggggcgctcattaagatggagctgatgccgtagctcttctgtcacaggctgacattcactctgggtgcaatctaaaaactctgtgcagtgaataataaccaactggggtctcttgccactcacagagaatcagcagagagagagaagcaaaagagaggagaaacaagcagatgttaatgaagaagaaaggagaaagtaagtgaaacataaagtgagaggggaaagtgaatcactttccaaaggtttagcatttaaaggaaatgatgggtgaacaacgctgaaaggaattaatactcctattgaagttacgtattgaacatgacctacactaaaccgccattagggtttcagggagtatggccggtctaagagagcaatgggctcacttgagcctcctgctcggagctccgtacttgtgggcacagggtgcggatgtagccttgctctgtctgaacctgaagtgtcccatgcacaagagtcaaggccactgcagtatggaaggagtgtgcccttaatatttggaggtgctggttcaaacgacttttttttcagtatgactagacctttaagagtctcagtttcctcatctgtaaaatgaggatgaatgttcttcatggagttcttcgggggagtgaatgcatgtgtattttgtaaagtgcacttttggcgcctcccaatgggaaaaaccagaggcaggaaggtaagaggggtcaggatgcacataaaaaatccctgggtcccccctcctcaatgtctctgcttagaaaacgaagtaggcaggctcctggtcctacaggctagaattgtagtcccatacctcagtgggtttggtaactcctcatgtcactccttagtcctcccatcagaaagaaatgactgagctccccaagcatgccccccagccttccacctgagtcgagagtaacagtggcagtggaaagctactgtcccatgtgaaaaggatagaaactcaatgcccagagtccacatggcctggatggaggatcccacatagatctttagtactgttggagccacgcttaccatgtttccttttctttcctaaaacaaaagtctcatgaaagcacaacattcaagtatggttttagaggccagaatcttccattcaacacccctgatgcccttcctgtactcaccctactcgcacacaaccaaagacacttgtggaatggctgacagggaaacaggtgacagaagagagtttttttggagcctccagaaggctctaacagtgccccctttgagaaccaactatgccaagaggggttaaaactggtgctggaggcagggaaggaatcctaaagggcactgaactgctggcgctgctgtctgtgaggcactgagtgagtcacttcatccctctgggcctctggttcaacctctgaaaattgaatagttacaaactgtctgcttgtctgcaatatgccacctgcaggtgagttttgtctgggcttcattgagatgttgctgaattgttgtgttgtgtagtgtgaatatgaaacactagacgaggcacatactccaactctccctattgccccacactcagggacttctagcatttacatcatctaccttgccccaaggccatctccactgtaaatgcttagtggagataatggtttctcagggaccactttcttgctgtgtgaccttagacaacttactttctctctccaaacctcagtttcctcatctataaaatagacgtaacagtagtatctacctcatagagtagctgagaggattaaataagttaatttatgaaaaatgcttagtgcagtgtctggcacgtacaacagcacctgctacatcatcattattattaattatattttcatctttgatcttagattcagcagatcctcattccattcattaagcttaccatagaagaaaaatttacttcagcatcagcttttaacaacagactttgagaaagtggttgagcacgatccaggctctatgggatgaatgaatgaactggggcaaccaggtcaatttcttcaaatcaattgtctcaccttttcactactggtcccctgcctacctcctccccactcctccccacccctaaagccaaaaaagcactgaactcaagagttagaagcatcaggttccagcttgcacccttttccatggtacttaatgcctcttagtctcagctttttcatctgtaaaaagcagaccacaacacaaggagatatcgtctcaccccagttaaaatggcttttatcaaaaaagtagggaataacggatgctagtgaggatgtggagaaatgggaaccctcacacactgtgggtgagaatgtaaatcaatacagtcactatggaaaacaatattgagtttctcagaaaaactagatacagaactaccacatgacccaggaatcccactagtgggtatacatcccaaagaaaggaaatcaacatatcaaagagatgtctgcactcctgtagtcattgtagcatgattcacaatagtcaaaatctggaatcaacctaaatgcccttcaatggatgaacagataaaggaaatgtggtataatgtatacaatggaatactattcaatcataaaaaatgaagtcctgtcatttgcagcaacatggatggaattggagatcactatgttgagtgaaataagccaggcacagaaagacaaatattgcatgttctcactctcatatatgagagataaaagagtaaatctcttgaaaatagagaattatctattaccagaggccaggaagggtagaggaaagaggggataaagagaggttaattaatgggtacaaaaaaatacctacctagtgctcagcagttcagtagggtttccacagttagcaataatctattgtatattttcaaataactagaagagaagaatccaaaagttgccagcataaagaaaagataaatattagaggtgacggctatcccacttactcggattttatctttatgcattatatgaatgtatcaaaatatcacatatacccccaaaatatgtacatctattgtgtacccatttttttagcaggccattatcttatcttagaggttgaaataaggtaacaaagccaaaagcaaacaacatagttcctggcatacgttagtcacactgtacttagacaccgattggagtctaaaccactccatttccttcctcttcactagctatgtttcgaacctgctagttgtacccatgggcatcacccaacccctggccacaggcaggccaaaaccatttgctgacctcactctctattttaagctgtgcctcctgggtctgctcctggccattcaggaagtcaggatcttgcagaagatacaatgttataggctccaggccccttgtaacaacactgctcaaacaggactgtctgcagtgatggaaatttatatccacagtgtccattatagctgccccatgcagccactggacacttgaaatgtggcttagcaactgagaaactgaatttttattttatttaattttcattaatttacaggtaaatagccacataagaccagtggccactgcattggctagcacagccttaggaccacctccagttgttgccaaagtccatctgaagccactcttccagacaagacatctgaaacttccaagcacctggctggcatctttacttggattttgctactacttccatcaaggctggcgtgatgaggcaggaaaatgagatcactcaatggctatttccagtgcccttcaatcactaggcaactagatgatttgttttttaaaatgcaggtaaaatcaacatctccccttggttcactgtatttggggagtgtacataaattggacctatgcttgtaatggtctctgaagggtcctcctgcagtgggataactctatagagctgtggggcacctaagcaaaaaccagagctttgaggccaggaaataaaagcctgtgcactgactgcagattaggggcaagaggctgggggactttttgaaaatgagatctttgacatttccatttcactcagtcaaaaattccacaagaataccttacttaacaatattttttgcattaatcttgccaagatcagattccaagaagcaataaagaatattaagttaactttcattttaaatcaggaagtttgttaggtttgagatcataaacaaattatcatctttgccaaactgagattggccctaagagagaacagattcattctctcatttggaaggcatgagtcttgtgtggtttcatgatcttcattccataacattaaatgtgttgtgtgaatggttctaaactagttgctctagacaaaaacaaaacaaaaatcttggtccaagtaagaaaaagttgggaatggaaaggaaaactgatctactcatttgataaatatctatcggccaggcgtggtggctcacgcctataattccagctctttgggaagccaagataggaggatctcttgaagccaggattcgagaccagcctgggcagcaaagcaagaccccatctctatctctctctctctccatacatatacatatacacacacacacacacacacacatttgtgtgtgtgtgtgtgtgtgtgtattttaatcctcaatgtacgccaggatgacaatgggctcaaagttcagttagtaacaatgctatagcaaattattattatatatggtacatggtgcacacaagacatctgggaacacagagaatgcagcaatacctggcgtggggaaaagtcaagaaaggctttacgaagaggtaacctttgagttgcaacttaaagaacaaatagaaatatgccaggcaaagatggggaagagaaagctacatttcaggaaaggaacacgggaagaaaggaaagcacaaaggaagaaaggggcattccacactaaggggcaagcctgaatactggccccatttttattttcaagcctgtcagacctgccagtccttcctggctcccttgagcctcttccaaatttaggcaaccagtccaagcacatcatgtccctctgggtcacatcccattaaaacaaggctccaaatggggtcccactaataaaaccccataaccctgctaatcaaaactgcttattttacaagccccagcaacccacaatatatgggaatagtgtttgctgtttcctggaaaagaccacgcactgctgctgcagatagccaactatccatacgatggtgacgcaaaacttccagtgggagctggagaccctctgggtgggccggctgtattgcgaagtgctgtggtacttaaataagaggcactaaatgacagttaatgtacagagagaaatgtcaggaggctaaaagcagccataaagtacagtccaatagagtgacgcacaagaaggaaaaagaggacagcagtgaccagggtaaatgtggactagctggaaaatttcctggcatgccattggattcttaagattgatcttctacgccatgcttaaggagaccaagttttaaggagtacacttaccccaaagtacagaaggaagttagaacattcacagaaaacgatataatatcactgataggtataaagtcaaaaccagcctataatttttggatgaaaaacatttgttccattattgtgggaatatctcactttaagtggcaatttcaaaatatgcaacagtgttctttttttcttttttattatactatatgctagaaaaatatcagatttttggtagagtttttgtttttgtttttgtttttaatcctctgataaattaggtcacctcaccaggctctttggacatattgggtggattttctcaaataaaggcatcacagtggtcagctggcaatatcaatgatagaattcaggtccccagaaactggaaccaagtagggcagcactgtgaaaaaagccctggacttggcatcagacatccatcagatttagctttcagtaccagttccacccttttctccctaagtgcatttaaagatacaaatctcttaactcctctggaccttaattttctaacctgtaaaatgggaatagtaatacctcacaagatttctgcaaagattaacataatgatgtgagtgaaagttagccagacttgtggcacatgcctgcagtcctaaatactcaggagactgaggcaggaggataacttgggcccaggaatttgaggctgtagcaagctatgactgcaccactgtactccagcctggatcacatagcaagaccctgtctcaaaaaaagaaaaggatacggaaaatagtcagtactcaacaaatcttagttcaattgaatttgacaaccaaataccatgcatttatgcattaataagagtttgatgttctgaaatctggacatgttaaaaaaatggccacatggcaattgaaaatcccttttttctgaccccttgcctaattatcagtcacaaatagcagcaaccaaccccagttccctttcattttcaatgcacgctctgcaattagacattggttaggagaaaagaaaatgtattaaagggatggttatttgcttcctctcctaaaatcctgtggatgattgattcataaactacacattatgaagttgaggtctcttttttatacagtagttgtagtttcaaaaatgaatggctttatcaaaacaaagctgaaaatggatttcttagtccctcccttctgtgatgtctttttggaacaattagcttgaaagtcagctttctttgtctaggatccttctcaatccttccacccactcaaaactattagcagttcaactaacttattttcatttacttcatgtatttaatacctatcttgttctcaaaaagaaaaaaatagagacttctaactccagctaagaatagagattcacacccctttctgggaaattcccacagtgggcctgagtttcttttcctccacatgcaaattccaaaagctctacatttatctgcctgatttcaatagttagcgtgcatataaccaaaccttcccacaaatatgcacacggacctaacctcctttaacctccagtcttctgagttagagtgtgtatgttcaaagtttggttcttagagaccttctgaatctagtttatactttatggttctaggagtccccatatatcatgtacgtaaaaagccaaaaaagtcaagttagggattaaaaactcctattcttcaaatattctattataatgattccagtgaaacacccacataaattgaatcatttgtttctctcacaacttttctaaaattcaaactcttttctaaactaacattccctaatatgtacttttggaatgacctcaacgttctagaaatagtggcctgtatgacatgaaagattccaggtagagacaatatggctttttgtttttttcttaagggcttaataatatctctaaaaataacaaatgccacgtgatgcagtcttttaagaccgtgcatcaacttaaactaagtctttgggtttactagtggaaaatgacagtatccatttataagaaggtagggaagcatccaaatgaaccctataaagctgttggccaagatcttgcttgaaaattggaagctgatgcggggatcgtctccctggaaagggtccatggccctccattctgaacactgatgggaatgtgggagctcaggaactcaaaaaaaaagcagacattcttggggtcatatcagaatcaccttgaaaatgagagcaacaacgatgcagatgaactggctggagcatttgacgccctttaccacaggaggaagatcacattcctgcagaggaatacaccacaaagccttgccatcaattcagattttctcccttctgtcttccctaaagagcttatctctgaagaggcctagggtggtaaaaagccctcagaggaattcagtcacaatcctgggactaagagcccgcctcctcactgaaaaaaaggaattagagctgggtgtggtggcttacacctgtaatcccaactactcaggaggctgaggcaggaggatcgcttgagcccaggagtttgaggccagcctgggtaacatagcaagaccctatctcaagaaaaaaaaaaaaaaacggggattgggagaactaggagggtggagagtaggaggtgaagtgaaaaaatgagagtcaacagaattaaatttccccaactcacttacgcttctcacagaagcatcattcattggtactttaacttctcaaggaaaaaattcaaaggaatagaatggaagtagggaaaagatgggataagactgctttatcctaggcaaaaacatcattttgtaactgtgcaggatattgtttgttgatccttagcaccattctcacatctctaagctctcttttgcattccaggtttatgaagcctagaaacttccttcctttcctggatgtttttgctaacaagttcctggttagatcccagcagtgagaggctccagactgaggtggggaaggtggaagagaaaaagaagctgctatgctccaggtgcacctggaagacgtcactttgatgttggcctgtggcaaaggtacagttttgccggtgacatcaggcatctcctgagaatcacccacttgcctcactgtagcccttcgcttacatttttcccaaatgaagctttcctgttcttcactcctccagccttctaaagattgtgtaaaccttgaattccctgtattaaatttcctcttcaaaatacccaaggtggcttctgtgaatcctgactaatacattagtctgccccatggttctcaagttgcaggatttgtaccaatcctaacggcaccaaggatatgtaaaaccctaacaaagcacagtacgtattcttgagccattttactcaatagtaggtaattttggaaatttatttttatattgaaataatcactgaaacatcatagggaaagggcatattaaaataaagttttaggaaccaggcatggtagctcacacctgtaatcccagcactttgggaggccaaggcaggcagataatttgaggccaggagttcaagatcagcctggccaatatggtgaaaccccatctctactaaaaatacaacacattagccagctgtggtggtgcagacctgtagtcccagctgcttgggaggctgaggcatgagaatcgcttgaacccgggaggcagaagttgcaatgaacctagattgtgccactgccactatactccagcctgggtgacaggagcaagactatatctcaaaagtaaaatcaaataaaaaagtttcaggacaaaatataaaagctaagagaaaataactcttgcagaaggctactttaccttgcagtctcaacctgaaggatgagcttccaccctcctctgtaatttcgagtatcttgatggaagagtttgcaacacactgcacatctttctctctatatgtctatctaagtttctcttgtgttccctaagaagggatttcagatggtacagcagtattggggaggttgaaagtctgtacattctctgtgaacagcaagtcaggttcaatgaagtcagagtttccatataaatcttttcttagcctactgggatgccagatccttggtggcagggaagacaccatgtctaatgagctttgtgcccagcactgtgcatctccaacagtccctggcccacagtaggcatgcgatagatatattattccctgaattgaagaatcagtggatagatggataggcagataagtatgtaccaagcacaagtggcaacagaggttaaatgataagaaatatatattgttaaatatgcaaccttgaccaagttattttgcctctaagccttaggttctgtatcaggaaaatgagtgttattatacctatttctcaggattgttagggttggaacgaaggtttgagaggtggcacaagcaaagtacctagtaaggtgtctagcacacagtaagctctcctatataatatttatcattatcaatttttactggatttgagtagtgtaaaatatgcttaggttaaacaagtagactgaatctaattcaatctttcctcaatggttcagagagcactaaagtgcttcagcagatcatttgagacatggtgtctccagttcattagccagagtggcagatagcagggtgccctgggtgtctgagctcaaacccccgcttccacaatggaaggtggagagaaaaaaactagctcatgttttggccacatggcagtcttccaaactgaattgttatttgggttaggattacaagattagtagagaggagcacacagtcaatgaaataatacattttgactccagaaaagagactgatacagcagcgcatgaaatttcaaatgggcaagactgtaaaactcatcacagaggctaaagtctgactaaaggcaaatgaataattatcaacgataatgtacacaggcagaggaatgcctggtggggagcctgtggcacccgtggtaagtccggttttatttaacatcttagttaatgatctggaaaagagacaaacaaaaaactaaagagagatgatgaagtggatatctgttggctttgcctgctgggcacctgatctcctactggtggtaacagcaccaaaactgtgctttgggaaacaacgcctcctccagtggataaaatctccatggaattgtcaaacaacatgccccaacctcccttctaaaagatgggcaagtgacctatgctgggccaaaaggatgctctcttcctggaattctaatcttaagcacaatatcacaaagactttttgatacaaagacattaaaccatctagcatcacttattccagtagcatatctctgaggaaaaaaaataaaaaactattaattcctgctacctacatccttggaagcacctggcatttttcctttcctttttctttaaatctaatatacttctttttttttcctgaaattaggcaatgttattttatatgagctgcaaaaaaggcccaaataatggagatacagcttctactaaatctagggtatgcattctgtttatctgatcgttcagcaattctcaaaatatttttcagacattagtgtaagaaacaccacaatagataaagcagtctattttaaaatcacattgtttagattcaacttggaaacaattcacactgacattttttctggaaaaaaagaaatgtattctaatattcacacataacggaacaaatcacctaaccttagaactaaggtgaaggcagagaatcagacatgaaattgcaatgagatgaggcacttttaaataccattaaagttctatattgcataaagtacaacacatcagacattagcaaaatacatccatggtaagtgacctctatggtacattgtctgagttattaagtacatattttctttaaagagagagagtaggcagagaataaatccaagggagtttagagacgtttactaaaagtgaatcaggttatccagggtaaagggatgaatgttcacaatacacttgctgttttccaacagccctgctctcttgggtagaaagcatggagggatgccgccatctttgcttggggctaaaagaagctccttgtttaagggccatatttgctgattacagaaaatttagccactgtggaccaaaagaggaaataaagtctaagggtgaagccagtctaccctcagcccaaatggatgtttctaccattgaacaaacaccctacactgtctccatgacaactcacctacattgcttttgggccagaataagaaagctactccaacaataactaacaaggccactctcttgtaaggagaatttgaaaaggaaggatgaatattttcttctcagttttggagagaatgaagattcatttcttaccctataaaaaacagagaatcttactcttattgttctttcttcccagaatctataacctgtgcctctggggggactagtcagtgccacattctggttggtgctttaaaaagacccgaggcatacactgcacacagcatgtaaaagcggtacacagtaataggtatattgtatatggataagatatctaggatagtatcagtcagggtcccaacataaaacagatggcaactccaaatgggaagatagaggagagtttaatgaagggactattttaaaaggtgtgggcagagtctaagggaaccaacaaggactggtgaaatgcccaggctctgacaactgtgagagctattatcatccctgctcccccaaagaagaaaggtgagggagctgctaatagaacccagcaggagctggacgtgtatgagtggccaccctacaggagctctggcttttgggagaagaaggcagggattctcaacccacagcacagcagggatagagggagctggggaaagggccatctaacctcaccctcctgactgctctctcctggccaatgctaaccagatccttaggaaatccactgatcctgtctacagggttcagtctcatcacggtcaaagcagagtgagaagaatgggaagaggatctagaagagcaaaaagaggaatatctgtatcttcactgatatctatatctatatttctcacaccatggcaacttttcacgtattcctccaaagtgtgtaattttttaacccttctatttctgtgtgagatctccttatcctctctaaatggtaatctgcattttatttaaatttcacagttttacaccctagagcatagggtgcaaaagtggtattttcctatttcccactatccatgcccagtcacagacatggacaaaaccttccttaaggctataatcatgaaataaaaatgaaggcaatggtagaaatgctaactgtcctccaaaacctcaaaggacaaagaaaatctgtgctttaacaatacataaaaaccagaatccaggtatcatttaatgcacacctgaaacgaaaacctacactaagaggacaatgaaaaacaatggctgaagcgccagtgttgcctttgactatggcactgacctccacttagcctgacttcaccttagaaacagccctcagcagctcccagtctttgactataggcaaagtccaaggcttcctataaaaacttgacccacgaccctggtttctgcaaaatcctattttacgaagcataacagagcaggaataacaggaagaaattaaggagtaatttaggaatgtgatgttagaagagactccaacaaaaggagagctgttatgtcacaaaaggactgcaaaagaaagtaggacagctgtcatttttgagatgtttactgacagaatcttcaaagcacagcttctttttctgatttccaccattttgaaaagaaacatgtttatggctcagcaggtcagaccagcacttcttacactttatctctccctggacagtggcaccagatgctttatgatcaagctgaattcaccatcacctatggcattagcctcacacttaaggaaggacccccgaaacaccccgcacttccctaacagccttaaaactaaccaagcccaatagtcaccttactccacctttcattcctggctattaaaattcaagcatttcaaagctattgaagctattaatagtgcaattttgatgagctagttcaaagtcagcactaatgacctgttgatgattttaatggtttttacaataagtactgcgaatgacctattgttaaaatacagagtgacgggcttttacattaatccattaactcttcttttctcgtcattctttccagactaaactattttcctccgttcaatttgaagagttcatagataaagaaaactaaagtacacagaaagaatacgttttagcaactgacaatcagaggaggcaatggaacggggcaagaatatgccagatctgaagtaaaggccaagtcctgtgtgtatgaaactgtgggttagagagggaataaatccatctggggcacacttagaccaaggagaagaaagggaaatggtgcaaattgagaaggcagaaaatgagaaggtgtcggagatggacagaatgaccaggccagggaactactagaatccagaatctttaaaaagccactccagcttcagcaacacacacccaatgacaaaaagcaacatctatcccccgttcgtcacttccaggttcactgctcttgttctgtaccttattgaatctcggggctatcgacccttgcctggtgtgtatccttaagcccatccacacctaaacaatgtgcattgctttcctcccgggagcagaagcagctactctcctgattggttttatccttctccagttgacagcatgtgctcagagaccaccttgtacgataaccctccttccccagtttctccagcatcatcctgccccatggatggaacctggatgagagctgagaaggatgtccaacaattatagaaggagcagagtgagtctacaaatgagcaaagtcaaggactttaccacctgcctggctctgcctgcatttttaaaaagacaaatttgtggccgggtgtggtggctcatgcctgtaaccccagcacttcgggaggccgagacgggcggatcacgaggagaggagatcgagaccatcctggctaacacggtgaaacccaagctctactaaaaatacaaaaaattagccgggtatggtggcaggcgcctgtagtcccagctacttaggaggctgaggcaggagaatggcgtgaacccaggaggtggagcttgcagtgagccaagatcacaccactgcactccagcctggggacagagcgcgactccgtctcaaaaaaaagaaaaaaaaaaaaagacaaatttgtatggaaggcatttaaggggatgtaaatgtgtatggaaattcaggaaccaggatacatggctgagagcatttgagtgaaagataaaataagacagataataatatcactgtaagagcagagaccacccaacatctcagcctgaaagaggatattgaaaatatttactgaaagaaatcacaaaactggcagaaaggcaagatatgatagcgatacaagatttcaagtatttagacatgctagaagtttaattcttttaaaacagggcatctgatttttccttctaacagcagtatttccctggaggttaagaaatctttgagaagagctgctatcgggggtttaattttccacctcaaggaagccttagtaacaggctagaaatgtttttttctgtaaagtgacagatagtaaatattttacactttgtgggccatatggtctctgcctctgtcatagctattcgactttgcccttgtagtgcaaaagcagccatagacactactaaacaagcagatgtggctgtgttccaataaaactttatttataaaaacaaatagcagaccagatttggcctacagactgtagtttgccaacccctgccctagatggttatatggaactaacgatgtcccagtgagaaaatgaccacaccctaccagtgtttatattagctaacagagagggtgcagccatatgcagtggctcacacctgtaatcccagcaatttgggaggctgaggtgggaggatcgcttgagcccaggagtacaagaccagcctgggctacataatgagacccccatctctacaaaaaaaataaaaattaaaaaaaaaattagctgggtgttgtggtacatgcctgtagccccagctattcaggaggctgaggtgggaggatcacttgagcccgggaagccaaggctgcagtgagctgtgatcccaccactgcactccagcctgggaaacagagcaagaccctgtctcaaaaaaaaaaaaaaaagggggggtatgctgtggaaaggatgataaagaaaataaaaagttggaggccaggcgcagtggcacaacctgtaatcccggtactttgggaggctgaggcgggtggatcacttgaggtcaggagtttgagaccagcctggccaacatggtgaaaccctgtccctactaaaaatagaaaaatttgccaggcgtggtggcacgcacctgcaatcccagctacttgggaggctgaggcaggttgaacccaggaggtagaggttgtgatgagctgagattgcgccattacactccagcctgggtgacagagcaagacttcatctcaaaaaaaaaaaaaaaagaaataatgaatttgagtctatggacacatctaaaagggcaatgtgatttaaaagagattcactgctttaaattatttcattctggctgtataatagataacaattctaattcagaagatatttaaaggagataatatggttacctaaaaagttctgtgatgaaatcagattatgtaacaaaatatacagaagatgaggatgcactcataatatataaaaacagaacagttataaaagtataaggataaacttgtaagaaaagtggctaaagcttagaaaaaatggtaaaagacttgttaaagctatgttcaaaagaaagtgatccaggaagtgatagaaacagttttgtgtgatgatggaaggttacacaatgacaaagagaaggcagaggtattcaacttttatcttgctttttatatcttccacaaaggaaaatgatcttcaaactgcaaagggtaaggcaaacatggtttaagataaaactgaaaccctatatgggaaaaggaatagttaaaaagtagtcagtcacttaaacatacacatcaggtactgtcccaggacaatgacaataacttaacaacaatggctagtgtttactgagttcttaagagatgccaggcattgtgctaaatacttaataagcattaactaatttagtccccacaacaatattatgtagtatgtattatgatttttcccattttatggatgaataactaaaatattaagaaacatgttcaaattcccagttagtaagtatagagctaggtcctgaattcagtgtgtctagcacataagtcttgcttttatagatacttaaataacctgaagatttgttcaagaatcattatcaataatccttaagaaattatgcagaataaaaagatacctaaatgggagaccggcatgggttgttatttttaagacaaacaaaaaaacagtgaaatccataaaatatgaccagttctaacttgcatagattcacagaaaagctctaaaccaaaccgttaagcaaatagtgctgttgctttaaaaaaaatacagtatgtgatcaccaggaatcagcatagattcattaccagtccatttctgcactagccctgcccagctgccagtaataataaccctaacaacatagtctcagcccagatccaatcctgagtttgggaaaggcaggtcttacgttatgctaaagaagatttccattagtgctggatatctgcaaactgtcttctgctgtatacctgctgttactacgctaggcctgaacaaagccctgagtgtctaatggagcatccagctttcctctatcctgtcacctgtgaacaacagcctgccataatgagctgcctaggtccaatttccaaactccatgtcagtggtttgaatctgagctttaccatttacaagcagtcatgaaacttagggtaaactacttcacttccttgataatttcttcatctgcaaaataaagcaccctagaacccagtaacaccgggttactgtgatggttcactgcaatggttaagtgagatacatattaaagcactccaaacaccacaatatgctaaataaataattattggctgggcgcagtggctcaaacctgtaatctcagcactttgggaggctgaggcgggcggatcacgaggtctagagactgaaaccatcctggccaaaatggtgaaaccccatctctactaacaacacaaaaattagctgggcatggtggcacgcacctgcagtcccagctacttgggaggctgaggcaggagaatcgcttgaaccggggaggtggaagctgcagtgagttgagactgtgccattgcactccagcctgggcaacagagccagactctgtctcacaataaatagataaataaataaataaataatacaagttattaaccttattttttaatagaatcttattataacctttgctgataggattattagactggtgattcagagaaatataaatacatgggatcttgatttcaatgggggcatttggccaagtttcctatgagatctttgagactataagagagaatggtgggcagattcatggtgcaatcaaggaggctcacagctagatgaggggaatgcatcttagaaggagcctttgtgaactgatccaaattcacccacgcaacagcagcatccacctgcccctgatcttgagccggtaaaaaccagaccctctgatgttgtggggccttcccaccattaatctgtgtttaaaaatggcctttggtttgtctacatttgaattaatgtatcggtaatttataatttatacccagctacttccacagaatgtatgaagcaggtaacctgtttattcatgatttggataaaggcagagggagctgcttataaaaggatgacatcaatccccgagtgacagaatttggatgtaaaatagaccttggcaagccaaatcaaacaagatgaagtgcaacagtgacaaccaccaggtccagcacttcagtccaaaccacagccccccaacaaaaaaaaacccatctatataataacagggtggagaatttgctttgaaatagcatgtgtgttcaagatttaaagcttagatgataatatcaatcagaagttcaatgtgattgtcaaaaaaaagcaatgcaacctctcttaggctacaactgtaaacatagaatattcagaatgaagaaaaatgttttcctggtatgttctacgtgggacagatcacatatggactactagttcagttctaggcattacctagaagcacttgaggtcgtatagaggtggtttgaacagaaaaaatatttaatctaaaaattttaaattatactagttgaaagacccagtggcatttatttcctaatacttgcagaacatcatttactcacactctattctccctttaatcctctactgaaattgcttgcatagacgtcaccagtaatccccatatcaccaaatgcaatggtcaatttgatctctcatcttcctctgtcatctgcattcaacaatgttgactaccctcttatttgtgaaatgattccttttctaggttcaataacacttcagtatcctggtttcttcctacttcagtggtcagtcttttctgtctctctctgtctctcctccttttctcaccctctaaaagtagaatgctccagggattgatacctgacattttttccatctaactaggctcactccctaaatgactgcatccatatccatggcgttaaataccatctctatgctgacagctcccaagctgatatgtctagttctgacttcttcaaacctcaagattcaaatggatttctaaatcagaaataccttaaactaattcagacaaaaacacttcctgttttcttgcaccaacgttgcctctccctaagtcttccgtatctcagttaataccaacaccatttatgcaactgcatagtcatccacaattcctctctttccttcatccctccatatgcaacctccgcaagttaagtcagctgtacaatgaatatatatctagaatctaacactgtccaccacctccataactgcgaccttaatccccatcatttctcacctaaatgatgaaacagccacctaagtgtctctctcccttacaaactattcactctctagctagattaaaacataaaaagacaacatcctccaatcatcctctttccatcacacttagaataaaatgactttccattatagaataaaaatccaaacctcttgctgtagcctgaaaggccctcatgattcagttcctatctatctttccaattcctttttttaatacacttatgctcactacattccaatcacattgactgtctagctactgctcaaacataccaaactcgctcatgtcctggggcatatgtcctggttgttggttctctagtggcccactctctttgatctatcaggtatctgcacaaatgccacctgctccaatagatcttccatgactacattacccaaaagaaccctaaactctctatatttgttgaggaatttaacattgtctaaatttatatcatgttttacatgattaatatttatgtcctccactagcaagtcagttctacaacagggcttttgtccatcttcttcatcactacattcccagtggctacagcaatgcctaccacttaattggcagtaataaatgtctgcctactaatctgtgcattacaggtagccatcacacccagtcaaaagtctttatttcagatgtattaagcattcaaaaaatggatgggaacatgaaggagaagtcctgagagagagaacacagagaggcctttctatgatgcctaccctaaagcttgtactggaaagactaagactaagtgagagagatttccagaaatgggaaggatccagagaaatgttcagtcaagaaccaaaaggttgggagaatcttgattttagacttctcagaaatcaggatgaagtaggaagcagccaacccttaaccacaaaagcctaatttctacactgttctcttcccagataaggtaagtagaaagacttcatctaaaactattggtatttcttcattggtattccaaaataatggtaaactgttgtttgcactgaaaagggctttgtcgtgtgtgtgtgtgtgtgtgtgtgtgtgtgtgtgtgcgtgtgcgtgtgtgtgtgtttgtgtgaatggccacagctactgttgggcagcttctcttccatagctacagcttacagctctcaccagacccctgaggcatgtttcctttccccttgcccattcaaccaggggtgatcacagcttccagctgttgctagtctccagcctgttagtcatcagctcatgctaagtctcttatttcttcccaccacctctgcaaatagtacctttaacaaactctcttcaattaaaccctttgagtatgccattgtctccctgccagcaccccgactgaaacacaggtaggacccaaaagatgaaacccttccctggggcagcatcttctatccaatcaatttaatgtggctgctatatatctccgttttggtcactacctgaactccaagactggtagattaatttaacaacaatctctgtttctagctaataagccattgaatcaccattcccccagacatctccttgatacggtcctacctgaatatccttacacttacagttctgttctatttttactctccacttaaccctgccttcccaaatgcaacccactagccattccctaggatgcctctgatgctgctggtacctctgcaagaagggtatcaggtatcagccaaagcagctaagactcaaagatgagcatgtggccctgcagagcaattggaaaggaaaccaggaaagtaaagtagaggcccatggtggaactagattgtaagaactgaagggatggctgcaggtgcatggccaagttgccagacactatagatggtagggtgtggagctacttgctgtggtaaagcctggtttgggatggggacaggtctaagctaacagaatgaggttcaccctgcctgaaggtgagcagggctagaagcggtaagagtgaatattttcctcctcctcaagccttcctcttacccttcaatatcttctgctcaccaccaacctactcaaattgctgattctcctaaaatatctgttaccaccaccaagtcctaccacttgaggagactatatgcacatagaggcatgaattctgccttctatttctgctgttttctgtagcatttagcctagtgctaagtaccaagaggacttcagaaaatgtttattaattcactagctaatcttggcagctgatttttcagtgactctcacagactcaaatcctaatactccttgacaacccatgcctacccatgctcttcctctgtgtccaaatctctccagccaactgtttccatgtatgttttattcaaaaatcaaaaattacacaataactaaatttccagaagttgcatgccattgactcttgtccttaggaaactatttggaaacagggttagatactatagtttacatatacattatttccttttcttcacaaaattcgttaatggtgggatgtgacaggcattgtgacttccactttagaattaatgaaaccaaggctcagaaaggttaagtaacttacacaagactgcagggcttgtaagtgattttaactcagattagaatccaggtctgtgcccgctattccacagtgcttctccgttagcacgtctctcttcctaccccaggttgataccctctttcctccacaggctaccaagtgggtgtaacatcacagacagatgcccataacagggcatctggccatcacgtacaacttcatcactggcaggaagccaagaccccaatccacatgctgagtcctgacgcctggcttccacttgctgttgcactcactcctcaggagtgatgctcaccaacactctatatggaaagcatggctccaagttctgatgtcagcaaagccatgtgtgctcatacatcctcagcctctgatcatctgtcaaggcagatatgaccagcagccagaaaacactctgctctggtactcttctaggtctccagctaaaaaatccgatcacaatcagcagcttgttgtcttatttctcctgttcctggttcacctgaatggataagatgcttgtttccatttccctctaaaagaagacccaagttttctgagaatagatagccaggaactcctgggactgtaagatagagagatagaaggaacaattggtccatagatgagaaaagtatgtggaaacgtaagattaacttagggttttaaagagccatagctaagtaagcttgaccctgtcatagctattcaaaaggctagcatatgtgaccagtaaaaaattataagccctctgtatcatacaaatcttgactataagccatagttagtaactgctatgctaaaacaggactcaataaactacttcacaccaacctcagaacataacatgaccacaccttcttttgggattcccatagcaataatcatatgtgcatttatgaagcatttcgtctcatccttagaggagaaaagcattttctccatagtaacaatacactgaatgatcctcccagagcgctgactattgtcaagtcagggaatatatgatttaaaagcattaacttgattcaaactgcctgggtttgaattcagactatgatacttactagttggatttcctgccatgagttacttagccccttatgcatctgtttcctcgcttataaaactgtgataaaaaatagtacctatttgatggcattattgtgggaattaaactaaatcatacatataaagtaaatggaagagtaccctgcagaaagtaaatattcaataaatgctaactattattaaagacaaagataagtggaagccttctgctttttgccatgataaaatacctgatttcaggccagtttcctactggaaacagctataaagctggacaaaagatgtgaggcaactatttccaggcagtggacaataagcggcataagactttgtttcctcagaaaatgaaaactttatgagatgagcccataatcatcctggctttttggcctagagacaatttcctgacagagagctagagtcaaagcataacacagtggctgcactgtgctgaggaggcagaggtcatagtttgtggcagctaaaaaggctagaatctgcagggtggattattagagacacatgtgcaaagagggccccatgagtccaagatgaggtcctctatgaattcatggctgagggctgagttatacatgcgcagggaaagacttccaagattttctagacagcacccattacagtgttaaaggtaaaacgcagttactagaggttgagcactggtggggaaagagaagtgctggagctgattggagttccagtcctgccagagtagaacagccttctttaaatgttaaaacatctgtggcatcaatctgagattccagaaatgcccctctgtaggagtaagatctgtaccccaaaataagacctactatagtctcaccctaataaagactacattcaaactacaacaaaatcctcaagggaacagtttaaagattgagtcttaccaagttagagggacttggaaaatgccatgagttttccacagatatgtaataacaaagcataaaaccaagcctgcaaaagttcaaggtgatcagccagtatttaagctgcaagaattaatacttttctaagggaaacaacagaatctagtgtctctaaaacatattatccaaaatgcccagtatttaattaaaaaaccatttatacatacaaagaaaatggaaaatgtgacacagattttggacttggcatgtgaaactttaaggcagctattataaatatgtcttaaaaagtacagaaaatatgctcaaataattaaaggtaaatatggccctaatgagtgaacagataggaaatctcagtggaaaagcagaaaattacaaaaaaaagatgcaaataaaagttctataactagaaagtacactaactgaaatgaaaaaaaaaatcattgtatgggcttaacagcaaattggagatggcagagagttggtgaacttgaagacagattaataatatcattgatctattcttattcttttatttttttcaccttggctgtctgcctagagacaatttcctgactgcagtaaagagctagagttcaaacagcacagaaataaaaaaaaaaaaggggggggggaagattgaagaaaaatgaaagagctgcatgttaatatttgacacaatattaaataatctaacatatatatatatataactggaggagtcccaaaagatttttttttaaatgagattgaagcagaaaaaagcatgtgaagaaatagcagccaaaaatttcccgaatgccaatttgattttcactgacttacaggtccaagaagctcagcaaacccaagaaggataaataaagggaatcaaacctaattacatcatgaacttctgaagacctggctaaagagacgatcttgaaagtagccagtaagaaagaaaaataaattaagtacagggaaacaaggataaaaatgactgctgaccagaagacaatggaataatatctctaaagtgccaaaaaaagaaaaaaaaagagaaaaaactgtcaacccagaattatattctccaataatgagagaaaagtaaaagcattttaagataaacaaaagctaagtgacagaacagccttcgggctgaagggaaacaacacaagatgaaaacccagatctacaagaagaaataagatgtactgaaaatggaaaataaatgactaaatataaaaggttatgttatcattctttctataatttacagaagataacactgtttattaagacaaaaatgattataaggtgaggtttatagtatacatagaagtaaaagataggacaacaatcatactaaagacaaggtggacagtcatatgaaattatcctcctgcgaagttattacacttctgaagtgggaagtgagaatcaagaaacaggaaataaaaattgggaggtgatgggtaggaagtgagaaacaggaagtatgcaatgtcataccttacgtgtgaagagatacaatgttgactctaaatagactaacataattaagaatgcattttttagccctagagcaaccactaaaaagatactaagtagaggtataagtaagaagacaacagaggaaataaaatagaaaatatgaaatatattttatttaccccaaagaaggcgggaaagaagaaacagagaagcaatgaaaatcagaaatcacaaatgaaatccaaatagcaagacatagacattagcctaatcacttcaataattacattaaatataaatataccaactctccacttaaagggcagagattgtcatgctgaaaaaaaagcaagacccaactatatgttatttataagaaaagcattttaaatataaaggaatatatgggttaaagtaaaaggatagaaaaagctgtaccctgcaactacatgatccagcaattctactttttgacatatgttcataataatatttgaatgtaaatgtcctttgtaggtttattcgtaataatcaaaaactggaaatgatccacttgtccataaatagtaaacaaattgtggtatattcataaattcaatactcaataaaaaggaacaaactactgatatgtgcaataaaataggcaaatctcagtttgctaagcaaaaaaagctagattcaaaagattacatagtgtgtaattccatttatatgaaattctagagcaaagctaatttgtggggatacagataagagtgatagttgtcttgggtagggaactggtgagtaaaactgactgcaaaagggcacaagagaacttccttcgatgatggaaatgttctacttcttgatcagagttgctagctattacagttgcttatgtttgtcaaaagtcatggacctgtacacttaaaatacgtaaatttttgtggcaattttacttcaataaagttgatttaatttcttaaaaaataaagacaattaaatgcttctcttctctttttgccattacatcaaacttcaacttacgctcattcaggaaagaaagaaaagagaaatggagaattagaacaaaataggagctcacctcgaaagactttaactgttccctactccttgtctattctgaatgtagtctttgaattaccatccaatatcattattattgttactaatcaactttgttgatcttcagtagcgtttagttatctataaaaatctagtttttaaaattctgctgtggatcagggaagttcaaaaacacaaaatacattcttgatatggtttggatgtttatcccttccaaatctcatagaaatgtgatccccagtgttggaggtggggcttgatgtgaggtgtttgggtcagggggctgaatctttcatgaatggtttggtgcctttccccaggtaatgagtgagttctccctgctgtggttcacaggagatctggttgtttaaaagagcatggcatgcctcccctccctctcccttgctccttctgttgccacataacacgcctgtttccccttcaccttctactatgattgaaggtttcatgaggctctcaccagaaagacagatgcctgcaccgtgcttttttttttttttttttttttcctttttgagacaaggtcttagtctgtcacccaggctagagtgcagtagtgcaattttggctcactgcaacctcttcctcctaggctcaagtaatcctcccagttcagcctcctgagtagctgggtgcacaccaccatgcccagttaatttttgtatcatttttagtagaggtggggtttcaccatgttgcccaggctggttaaaatgcttcttgtacagcctgcagaaccatgagccaaattttctttataaattacccagtctcaggtcgtttataacaacacaaaatggactgatacagtttttaatccaagaaacatatccagcccacagaaagtacacagaatacaaaactagaaagggttgagtgtgcctgtgcattaggtacggcatcaaggcaggagctgggaagtaaccacagtgacctgtaaacctgtaagtgcaggtccatggtccagtggtatttgtattgcaagcttatgaatatgtggagaaaagagtttgcaatctgtagattctattgctaatttttaccagtccactgagatatttacagtttcaccattataagtgaaaccaagacttaaatattttgcaatagggcctgccttttgagtctgttccatcccattcacccctcagtgccctgatgccacttacacccacagcatctgggaaaacaatacaatttacagttacttagatccattttgatgggctttacctcagactgctttatgatttatggaaaagcagaataaggaaaccttctcacctttaaagaattccacatagctcagcctgaaggcattattccccagcggtttttatttcttaccttgccgtttgtcctccaactcatctccttggcgcacacacacacacacgcacacacacgtacacatgcaaacagataagtctccaaactaccaaaatgacgaagtgggagaaaagattgatttatgagggtaatacaaggggtgtaactaggagataatggggtgaaattgagcaaagggaagtgtaggctgaatatcaagaaacatttcaactcaacagagtgtgaagcaagctcccaggagaagccagggaagccctatggctggaaatcattaaacactcaaccatgggaaataacaggtggcctggctggtagaaaaaaagggagcaggggtgaaatttacatttcactaaaatcctagaaccactttgctaaataagccattctgtaacggatgagtgttccatctctgtattatctctctccctccctgccccaccctgacatataccccacaatcacccatgctctccacacaccttccaacatgatgattgaaactaggggactctccacacaccttacagggactttggggctccaattcacattaaccctctctccaatttcccttcatttcccacattttctttcactaaccattattatttatgctagtgccccactagcttccccagggaaagcagacacacatatgttcacacacacacacacacacacagtaggtaggaggtagataggagggtgggtagacaggggattcacactctctgtggccgttggatagagctgggccagttaccaagaatgaccaaaacagtactgctagatattgagaattagcttatatttcattgccttctatttttagtattttgatactcctttatgttcccacattgaacctggtcaaaagctaaaaatgcctgtaactagcacacagctccccacaaaccttgcagccagaaagttgtcccagaagaaaagctgacaactccagtcatatgcatgataaggctgaggcaggttgccaaaccctcctgctgtgaagatggacaaagggacaagaaaaaaatcacaatgatgctctgatttcaaagccaggtgaggaacgggattgggtgtgaccttttgtttctgagtctgaggtgtaaaattctgtggggtaggatggaggatataaactgtggggagcatgacttgatagtctagagaagttggggacaggacagccacctcagtggctgaggtagatcggcataaactgcccttaaactggacccacagggaagtggtggccgaggcatgcagcattcacagcatcaaacccaggggaccatcactgcagatttccagtctgttagcgtcctaaggacaaatgaaaagtgtcacttctagatctacgtgtgtgcaaaccatggtagccgaaggctgaaaacaactaaacataagattgaaagctgatcaggtgagaatgaaaatgaggcccaactgtgactaattctatgctggctcccgcagcgcagtgtctgctaaggacaactggaaaagcttaaatgttagcatgttactgccctctcctgggcaaaaggtcaaagtcggtacaaatgtttgagtcacaacttgttcaagtttgtgtgccccatagcagttaatctttaatccactcttttacaagcctttgaaaaaaggtctgcttttaccgtcttccacgtgcaaacctctctccatgaccaccaccatgttactttttccattggaaccaagggcttctgagatcacagacttcatcgggggtcataagtaattgtgggaaagggattagcatcatttgccagaagagctgatatgacaggggtggggaggacagcccagaacttcagagctgatctactctttaagcaagaaccccctttttctgtttattgccctgcaactgttctaggcaattctgggtctgagaaaaaaccctcctacaatcttcatcccactacatactatgtctatacttcagcctcaggcacaggcactatttgggaagctaagttgtacaactgaataatgtaattaaatgtaattcattccaaatgttaagggctagaatgtcttctcaaaattaatgaaaactcaattcatttggaaataattatttcacgacttttagttgctgtacaaataacattttaacagaagatacatatgaacaagtaaaataaaatgaggcaaattaattaatgatatcctaataggcctaagttagataatcatctattttctataaagttcccaagtaagttacttatttccaactcttcattcatacaaactactaatgtatataaattaaaataattcaaattagtgggagtttagaatacagtatctttcagtagagacaataatcactttgaaggattctcatcctcaacaaatatttatccagagcctgctgggtacacagcactatatgggagagacacagcacaatctcattatcatctctccctgtgaggataaattgcagaaaatcctgaaagccactgtcggagttatcttgcttggctggcattttgatcacatccttgacccctctggtccctcagaggccctcccatcccggttcatggagaaaagcatctctttagcagcaggtggtatggggtgggggtggagcaagggatgccacagggaattaggggacctgacttctagccttagagcagccactgctcccgtctgataagagcacacccccaggcacttctcagtagatgtgcctgcctgtgcaacagcacttcaggaaaagttcacttaatcctcacaacagccccataggtggatcttcttattactccaccattttaaggatgaaaaaggagaagtgtacaaaatttaagcattttgcccagttacaaaaccttaagaaatagagtcaggattcaaatgcaaggctgtctgagtcataacttcacatctgaaatggaatcaacccatcaggcttgctattttcctgacaataatttgtttatgtaaaggatcctgaagtcagatgatgtcacactcctactcaagattctcccctgactcccccattgaatttagaataaaatccaagcttttgccatggccttcaaagccctacgtgaactggcccttgactacctccgtgatctcatctctcccacttctgctccattcactaagccctaagcatggcctccttgtttttctttaacaaacatgtacatttctactccaaggtctttgtatttgttgtttcctcagcctgggacgctctcatcccaaagaactacattcctacctcttcagttcatttatgcctctctgctcaatgtcaccttatccaaaaggcctttcctggcccctctacctaaaacagaaatttccgtcactgtctagcccctcacctatagtccattttattcacagtactcatcactctcgtctatgatcatatttgcatctcttcgtttattgtctttcccattacgatgaaagcttcaggaggcagtgacctggtctcgcctgctcactgatgtatcccaggcactagaacagttcatggcacatagtagacgctcaataagtatctactgaattaatgaataaataaatgagcataaatccctttatcaatatatccagatttgggtactttaagtttcatttgtaaaacaaatctagaaaagacaatctcaaatttatatggatgggcctattcattacccaatttatctaatttcatccatttctgtctaggtcttatatcattctccaaatctgaaacaccctgttttgaactgccaccatttccttcctataagtgccttccatgatttcctaaaacccttctttaaccacatactgttgaggagaggtaatattccaaagccactatctcagtcatacaacccaacatttcacaacacttcacacaagtctaaatcaccaaatgactcctatgtgttgctacagatagaatccttgtccatgccccaaggtagcttcccaacagaagcagagctgtgtgtacgtctacttgagacgcttctcccagctggctggcctgctgtccacctcttgctctgtagccaggttcttgcaaagctccacatacagagagacacttactgagatgcctttgagaaaaatggtaacagcagctccagttattcagcatctttgtattttacatctacttcctctagtcctcccaactctgcatggtaggcttcctacttctcattttacaaacaattaaaatgagcatcagaaaagtgcaacaacttgcccaaggccatgaagttagttaggggcagggacgtgaacccataactgacttgagtccaaaaaagaaacatttcttatagttttaacatagaaatataaaggctttcacctaataaatcaagtatttttcatcaattgactatatgtctcagaccatgacaggtaatctagaatacagaagaaatgtggaagttcccagctgagagggagagctatgggccattgattcagttatctattttcttacatgcttacggctttaattttttaagttctggactgttggttaagttaatttgtatgattccagtaaaccatgagttgtttatcataaatcacttctcagatggctacagctagaaaaataaattacttttctagggtgatgtgctttttaagaatagagtggttcaatagaagttcctaagttgacactaatcataaataggggctaaaagttcagggtctaaacaaattgtggcaggccaaaaacgaaaaacacaaagcaaacacacaggcccacaaagcaaaatgcaactaagcacctgctactcttcttgttccagattcttaatccattgaaggtatcattgttatgacattagaaagagtgagaagtggcagggtggtaagcatttttatgaggtgttacaatgttttaactaacctacacctccttctgaaggctttgttttccgtatcactccagatccctgtcacactgcagggtgttactgcttgagtctggctctgcctgtgtgatcctggagaaagattatttaggagctacctaccgctgttgatacgagaaccttggtcttacctggcagaacagtgataagttcctgtgaatacaatggcagcagattttctatagaccacttccactgtttcctctccagagctagccttttcatagagcacagtgggcagcaccagtacctacctgtgtgtacaaatcctacagtgagatgggctgtattaagagtcaatgaggggtgatctcttggcttcagaagcaacagtacaaaggcagtcactaaagcaggtcagtctaaccccagctgaagtctgtgagacatgggaacataaacaactagttcttcacctgattgatttcagaggcaatagagtctgatgcagtcatacttggaagtaaaccatctattactacatttaattccaaggaatgactacagatgccaaacagggcagcctaggatgccaagccactgctcatattataacaacagtgcatattataacaatgcaagaaaatggaagaacaagcctcatttgggaacagaagtagcagctctgtgggaaattccagagtatgatgttagacaaccccatggagagataatgagtgaaaatattgatgggtcaaaagaggaaacaaggacagtccagtgttgaagttagtataaatatgtaaattctgtgtgtggagggggtaaataatgtcttcaaacttgtttgctcagttacccactaaaaggattcttaaaaatttgttttaagctgatacctaatttcattcatcataatctaaatagttacaaagtatataatttctggcatataataaatactaacattttaaaataaaattacttcaccactcttccaaattattccatggaatataaagaccatagtaactttatatctaccaccatccatttttaaaatgtaagattaaccctttttttaagttatacatttgatatcattccttcttttccctgacattgaattcctcttccatctcccccacaaaattttattgtaatgtaatatataggttacattatatacatgatgcttgaaagtattttactggtcactattatacttctttgcaaccaaaatatatatatataaaagtttcagtttataattattttttatttcctgtaatcataggtgtttaagtgttgttttctggattgagatagtgttacaataattatttgtaaacatttggtgaaaataaaataaccacattaattttgacagacaaatattaaacataaatggtaaaatcttattacattttatgatatgtgtattttaccacagtttaaaatatgtgtattttaccacagtttaaaatatataaaaatgtattattaggactgttatcttttaataagctggagacagagatagtctatggttcttgatgaaaggatgcttctcctaacacaaatatttccaattatccctttatgtgacccttagaagtgttttcacctttgagcgatgcatatagtaaaatttgggtaagtgagaggtgtgattttctttggtaaggagagaaaagagcaaccatgaaaggagaggtgacactttctctagcagatggattttaggaaagactatagtaggaaactgataatctgaacattaagtcctttaaaatgatccatgccttcatactgctttgaaagtcttcatgtactcacaaaagtatctgttctccagtttgttgctgtgttgcagaacttctcaaacactttagacctgttgcttttcccactgactggtcagtgtagctaataaaccatgaggttgcacgtatgtatcccctcactgtctacaacaccattgataggaaaaaactgaggctcgccatgtgaattgtccttggattatagcaatgtaggctgcatgttgctttcttctcctcattatcttcccatagggatgagtcagcagcttggtccagcaagcagcaaaacccatgaaccagcctttgccagggcagttgtaacatagctcagacagtcacgcttcacctcactggagaaatgtggcccataaagggaaaaaaagacaatcacaagcccatatacgtggttttcccatacatccagtagcaatcctatccacatcctgcaacagaatgtttcaacatccccatgggtgttctacattgtatgtattcttagattttcaataatctgttccatcctctccttttcaacttgaaaccctagcatcaaaagtggctgttgatctgataggaccccacctttggctgtggctcattttccagctgcagtccaaatcttccagtgatgacacgaagctatcaccatggcaaccatcactgacacacagtgcaaagctgaggatgaggcatgagttgttctccaactcacttccataacgttaaaccacgctgtaggctttaacctactaccctctgggtttactgtcctgtcccagaaccagagaagcagccccccatttttaaactgaaattgttctttcactctcctcaggacctctccataagaaaacaatggcaaaggtgaccatatggccacctaggccctgaaagtatggtatttactcactcaaaacccaacaatgttgcagttaattgtagaagtgccattggggaaggataagatggtatctaaaagtagcacatgcataaatatgatacaaaatgtcaacttgttgtctaatagctacaagaaagaaggttctggggcaaatataaccacattgcctcacagaaaaagcctaaagaaagtctctgccaggggggatccttggggtaaatgctttcttttcataaggatcaatccaaccctgccccatatgtttaaatgctaaattcaaaaatgggctgcgatgaaagaacaacaaacctttgttagccctctggggggactaaagatgctgagatgtgttccttgctgaaagagcactgtaaatagcaaggaagtcctatttttctttgctagagataaagcacagtctcacagatttgggtcttagatttttttatatatatcctctcaaattcatttttgccagagtcatccggttctgctctgatgccaaagatttcaacacggttggtggtggcagagccaacactggtgacttaacaaagactattcactcaaaagccacatttctgaagagaagagacctggattctgcaaggagcaacggtacctctaattacaaaatttctgaaattcccctaaatgtaggttacattaatctcatcagcatgccaaggatggtgtgtcttgatttacttttgagtaaagactcaaaagttgtggtgctgcgacacccggaatgtaaggaaggtaactggtgactaatgggaattccatggacagatgggccatttagagtcactggcattgtggtccctctaaactgatgggcagccactcagaaaacccaggaaccacaaactcaccagactactgcagaccgctttttctctgaaagaactaagttcttgggaaaggagggaaagcagtcttaagagagtgttcccagaggttctactactttccctgtatcacaagtcctcagcaggggcaggctattagtccctgcagcaggtgatagcagaattatctgtgtggttgccggactttggagggaccattgcttcaaccctaagagtgcccagagatccaaatcagggctgaatccactgcctgaagaacccatagttcctggacagaaatgaggggagaagggagatgctggtttgcatttcagcctggacagcaagcaaacctcagctaggtaagagagttattagagaaatctcagaagattctggttgctacagagacgtctcaaacagagtttccaatctttccaactcctaggccctcccacatcctccagaccctctgagatcaaaggcagaaactttcctctccctcttcctgcctcttctctccagggttgctacaggtttccaggacccttaatctgaacactcaaccagagggaccacagggcctcctggaatcctttaagtgtggaagctgccgtggcattcggcaatcagctcaaagccaccgacataaggtgcttcaactgtgagggactctatggcctcatgatcaatataacatctacactgccattagcctctacaggagggtgtcaggtaccatgtggtggacatagcatcgttaacaaacgatttcatttacatacatgttctagtattacagaggaagatcacaaaccacgatgccaagaagttgcattcaatgtagtgtatattgatgggccatgagacagagatggatacagcctaaagggaatcagcaaaatactcacttttagatatgtaccaggctgtactgtgtttgcagtacagaagcctgcaagaaccaaaccaatcaaatttatgtttattatgaactttatgcacgtaagcactgtgattctccaaaatatactaaattcattaaggaggaactcaaaagagagcaacaaaaagtagtaaacattatagaacaggcacttaaattacctttgatcatgatgtcgattacagaacctaagaagaaaaaataagagacaaccagaggaaaaagaaaagttaccactttaaggggaagatattgatcaatttgctatttctactgaggctaaggaatggttttatacgcagagggaaaatcatcgtattaatctatggaagaatagccagtcaaaataggggaccacacactagaagttacaaaagaggttataaagtattcttccttgttggaaatcatttaaacagagtagatgaatcaacccaagagtgtttactgagaccccagcccaggctcagccccaaaggactgtagcattggggttgtaagtgggagctctgtagtcagatttacatgccttcaaatcccagtttggtcacttatgggctacacaacctaaggcaagttatttcatctctttaagtttattccttatttggaaaataaggatgataagagtacttatctcattaaattattatgaggattaagtgagaacatacatggaaaagcatttagcttgctaggatgtgctcaataaattcttgctattattgtttcttatatttgactccttgcctatctaaaaattactggcctaggtttctcatttgccagatcacaatgaacaatgaagaaataaacaaaaggagtgctgagatgcctcagattcctgcacgacagtaaatgccctttgctctctgagcctactctcatgcctctgactcatgctttgggcacaattccttaaaaagagtttccacttcaagcttatggagaaaaataagttttaggtaaaatattactttggtaaagcagttcaaccaagggccagaattttaatacctccagaatccctatcagaaataaattcaacatggaatgacaggcctagccacctacaacatagaaaaaagctaagtttgaccagggaagagaaaaatgaaggacaaaatctccaatccagaagtggtgcttctagagataaaaatttcttacacctcccactcccttgtgaacattccaagaagagcaaggccaagagagagtagtgatatggcctgccagataaaatacaggacacccaattgaatttgaacttcaatgataaatatcaaatacttttagtataagtatgcaaatattacaatatttgaaacatacttctactaaaaaattattgtttatttgaaattcaaatttaattgagtgttctaattcactaaatctgacaaccctagatatagtacagggaacctcctgtatgcagactgactgaggccagaaatgaaatagaaacactgaaaaaacccagagtgatccctgagcagtctctgcctggtagacaagctagagagcattcattccagggaaggataggaaccctgcagcctgaataagaaaatccaacgtaaaaaccatttagcctaaatgtaagggtgaagaagtcccctcgggcaaattagcttgtcttgttaacaggatattcaagtcaaatgatccagtctgtttgtagaaagcttactgcatccaaaagccaagcacatgcaattcatggttggtagagctgtataattgcacccatttgtcaaaaatctaggaagacttcatggacacttagcgtccataccacaggctcccacacacactgtatttgcttccatcacagcactcaccacacaaaatatgattaccaatttatctgttcatctctctctctagactgtgagcttctcaagagtggagacaaggtctaatttatctgtgaaaccacagccctaatagcaaatggccaccatactatatagctggttaacctgtgtggcttctgtaagggaattcacaggaagaaggggataaatagactttattggtaataagaaagagaagaggggagaaaaagaaagaaaaagaaagctatccttattaattgcttgcaatagattaatacatttatctgtacaggtcttatacctaagcacaattgatatatcaaaagtggatctgtgtatatatagcagtaagagagaaaattattaaagatttttattgggtttttttttggttgggggtgtgaagaaagaagtcaacgtgtatatggtgatataaaaataaaaatgtatataaggaccttaaggatgtgtctatatgtgcatgtcaggtgcccacacggaatgtgttagagcttccgtaaaggaagtgagagatattagaaaaaagactcaacccaattctctttctaaaaatattcagatctctgaagcactcgattctagaatcagttctcaataacagtccccgttgtgttaatgaaactgtaactcatcttacccactcacctttatacagtgtccgcaggaatccacaaattaggatatagttagcaacggtcctcctgaatggcattacagaaatgaaactaaaatactctgaaagcctaatactgcttcaggaaaatctccaccctgtttaggagccctgtgttctatcccatggaacctctcctcctgtgtttcctctctccttcctgcattcctccggtgagaacctccctatctgtacttcccctctctatcacttgcccccgtctttctttttcatagattgttgaaaactatttaaaagatcctgaatatcaaagtctgtcttcttctggccatgtatttaaggtatataatagcatgaggtttccaatcccccaggagctgggcatgaaaataaaatgttagaacttctatttatatttatttttatctcacccacttttaatttctgtttttttgcgtgctttataatgaacacaacatattagacagtatacacatataattatgtactaaataaacatgctggtcattggcattccagttctgtagggctgcataacaaaccaccccaaaacttggtagcataaaataacaaccagtgtattacgctcacaaattctgagggttaggagtttgggtagggcacagctgtgattgtttgattcatttccatgacttttggagcctcagttgagaagacccaagcatctgggaagtgactccagggatgcatgctagaatcatctgaaacttctcaacttacatggctgacacctgggctcagccaggaccactgaccagagtacctacacatgacctgtctgtgtggcttctcacagcatggcagcagggatgtccaaaggacaaatgaaccgagggaaccagatagacgctgcatggccttttctgacctggcctcagaagtcacgtagagccatgctcttcatactcaattagtcaatgcaattatgaagctgcccagatacaaggggagggggctggaccctccacaccatgatgtgcagtaatgaccaggtcacattgcagaggagaatgtgggatgggagagattgttgtagttacctttggaaaataatctacaccaatttgcttattcactctgagatctgtcccccatcccttctctttactgctctttattgcagagagcaaaaaccttgcagaccacatttccaagcctcccgtgccaaatagattctggctaggatttaccaatggagatactgccaagagatggtgggggtgctggagagaggagaagctacaatatatctccccctttctctctgctttggtcagcatcttcccaggagctgtatctcctccctgactgacattctctgccaggcagccaccacttgttccattctcagtggacaagttctaccttgttccctgtgacccaaaggttcacactggcttcctgctttgctgatctggggttgcacatggggttggccatgccccatttagctttcagctcttcttatccctttgtccctgattcccagcattaaattctcccttttgaattacctagtatgggctgttttcttcactgaataataatatacacagactagggataaaaacccccaaatgttttactcatcaaaatgtgggatttgaaaagcatgtagactattgacatagtttcaaaaccttggaatgggagtcaggctgcctgagttctggccctggaccaggcatagctacgtactttggtatttgcttagcccatcggccttagtgtcctcagccacacaatgagttgtcctctttggtgctaacattctgtgattctatctttcagatataatctgcctactaggtctgggcctaacccacaatggcattgattctgaacgtctcacctcagcactaaaaaatatctcagcacaaacaaacgtaatttgctacatgattcaacaaagggtgctggccaggttagagatactagagccatctccactgcaacaactggcccctgacatttcacctgaggttgaaatgggacagatggagccagcacatccggttaatgtgggagctcagagcacttctacctcctcagctttagataaaagcaagacagcattggtcatcaggctcttacaagtaaatctggccatctgcagactgagtcacatccaagttcaggggaaccactgggtgacattcatatgaaagtactgtaatcccagcactttgggaggccgaggcgggtggatcacttgaggtcaggagttcaaggctagcctggccaacatggtgaaacaccatctctaccataaatataaaaaaattacctgggtgcgatggtgcacacctgtaatcgcagctactctggaggctgaagcagaatcacttgaacctgggaggtggaggttgctgtgagccgagatcttgccactatactctagcctgggtgacagagtgagactccgtctcaggaaaaaaaaaaaaaaaaaactttttcttctttgaagggacaaaaaaaatcttatgacacaaaaggaacataatttgttgcaaaagggaagaaaaattgtgcaactgagacctccaattataccatcacaaggaatagctttagagaaatgctttcattatagaactgatagaaacagggacaaagtcatgtggttgcccttttttaggcacataaatgagccttccccaatgtacccatcctttgtctcttttctattccaggagaagaagatttgacaaaattgatcatgcatttaacaaaacatcttttaagatatttgaagtaaataaaatattataataaactataaacaaatgtgaccacatattttaaggtcaaatattctatttgattggatattatttgaggcaaatgggttacatatttatttagacctagcattccttgttagcagagagattttcatgctatttcttgtagcaggatctgacctatagataaacctaagtactattcagaaacacaagctggcaaaatgcaaatccaaaaccaaaatctgaaagtaatatcaaagatgctgaaagattaacagaaaggacagaagactcaccacacgtctgcagcagacatagaatcttgcctaaatcattatgttggctctatttgaacagggtagaacctgtgaggcattcaaattcaaaactttacttcgatgatttcaaggagcaagaaacagctgaaccggttctaactgaagcaaaatgtccttattctactcagctaaagtcagttatgcatccaaataattttgagatgaaatgagcagaattcatcatgtacactggagccggcttcttcacttaactcaattccacctttgggcctatatatggcatacaatactttgaaactacaaaacaagtagaaaaggcaaatgaagagataaaggtaagcagccagtggtttcaattaagacacaaagagccatcccatttaatgtgcctgctgtatgcaatgcacttttctagagtacgtgcagtgtgaagatcaagaagatgcagcctggctctccagggggccccagctgcatggtggcaccagacgcgtatattaataacttgcaaataagacaagggtgacaagggctgttgcgaatacagagtgatacgtaagaatgcaggagagaaaaatgcgtcccctgtttgaaggatatgggaaggcttcctagaggaggtgaggttgcagcgacaccttgaagaacttacttgcagaactttgacagtgctgggatggagtaggggatatgtctgaccaaaggcaggaacggcctgagcaaagccaaagaaatgtgtcaagggcactaagtgtgtcaagtgtgcactaagtgcacgaatgagctggagcagaaagaggaggaagcaatgcagtgggcaggaggcgacaaaggccgtgagagatgaaccacggacgcccaggcacgctgcggaggaaaacaaggacttcattctgcacgcaataatgagccattaaaggcttccgaggaggcagatatgattagatctctgatttaaatgacaactcgtggcaatttgagttatgttcttaaaatctacattcctcagagaaaattttgcaaaaatctcttatcagggcagtaactctttctctctgtcacagctgccctgaattctcctaccctcattctgttctataagcctctgtgtgaaaacaagcgcctttttctccaagtcgtttcctccaactgttcgttccgtatggactctgggtgccctgtgtgggctcacatctgtctgcccagcaacgagccgcatcatcacgagcatacctggagggtcttctggggactcaccagtaagcccgtgagccacagaacaaaacttccatttccctgtaaacatattcacggcaatgaagcgcacgacggaacatttttacgtggatgaatagcatccatgtcccttaaacagttaactctgaggttaacttcttccacgatttctctagactcaagagagtcagagttcagatcctccctctagtcctgcaattaaagactctgaatttctaaggaaagttctttttcgtcctctacccttaatttctgtgtataaacagactcaatttatctagggcgagaattccaatgctgtatgtcccacaggttaaagagagttcaggttattttcttataggcataaaaaataaattagattaaaattcaagtggagcagaatagtgaacaagaaaagagaaagaaaccagcaaagacagggtcaggccacaccatgccataccatcaacctattgcttccattagctgttctcttggggatctgtcattttctgttgcttccactggactcggctcagctgcaacaagtctgccattgggagcctctcctgggaggtcggcctcagtaaatatagtaactagtatttttgatgtaatgcaggatatgggaagaaaggtacttagggcatttggtgtgtataccatatacatgtgtatgggtacacacacaagcttgagacagagagagagaggactgcaaagagaggcttctaccataaagcactactgaggtatctctccgtggaaattaaagacagaagcacccaatgaactcatcttcatctcattggtaaccttccactgggccagatggagaaggctaatgctataatatattagagccccctccaccccaatctctgagaagcagttcagcttcctcccatgacctgtctcctgtgggaagaggcgagaaccacacaggaacgagtgctgagctcctataaggctactagaagggaagagacccacccaggagctggcggtttctcctccacaaatgcctcccacccagtgccgactccccagcacagcagtcggctccctcatctctcttgcctcccttgatgacgatgcaggctctgcggaggcccatcttgggtgagctcccacattctgaatcttcgtggtttactgtaacctcccagaggatgaaaagggaagggagatgtgaaaacccagattaggcaaattactaaccctgacaaatataaggacataacgaatctggagctgacatgtccaaggaggaaaccacaggctgcatatgactgttggcacttaaattaactgaaattctccattctcactagtcacaggtggctagtggctatcacattggacagtaaagttagacaacatttccgtcacggtagaaagttttattggacagcgctggtctcaagtctcttgggaagaggtctatttgcaccttggattaggaataaaatgtagtgtttgtgataaagtgaaaagagcactaattaggattaattctaggctgagttttactaatagtggactaataatggcaacacaatctgtaaaaataatggcactgaagtggactaaagctttaccttacagagtaagataaggcaacagggttcaatggaaagcatgggaccccggaattcacaagaactgagtccaaacgccagcacagtcctgatgcccaggagcaagtcacatgagctgccctagccttcacttcctcagctgcataatggaacatcatcatctatctcatttgccaaatgaggtcatagatttaaaatatacttaaaagtgtccagcttgctgccaaatgctaaacaaaagctgggtgtacccccataggttagtacacaatatgtttctgtctcctttttccctagggaggttctcattagcagatgcccaggacatggcactggtacctttttctcataccacatgtctcatcccgtgggcaacctctgacggaggcattttgttgcctgtgtttggcaagcccagatttgcttcctcctcctccctccactcttcctcctccatgttctccttctcctctttctccttctcctactcctcatcctcctcctcttcttcccacccactaccaatacaaccacaaaaagacgagaaggttattttaaagtcacccataaaatatgcccttgaagtcccgccttggctttgagagaggggaaaaaagacgttatagagacgtcatttattgaagtcctcctctatccagagcacttgatttggaccgcgggaattagcttaaaagaaaaaaaaagggggtggagggggaaagaaacatacacatttggatattctctaaaaatactaagggattcttcatacacatcagcaagtgtaaattaatgtaggccaagtctaataaatacttgtgaccaaaatgagagacggagtaataggacacagagaatctggtgggttattcaggaaagtttcttaggggagttcaaaattgagccagattttaaaggaggtgacagacagagtttggcaaaaggagagaaggaggctttccaggaaggggaattataacactctaaggtgtagagacagacagggaggagttccaataggtgaacgcccagagactgggagggagtaacacaaaggcaggcagccgccagggtggggcccgcagggagagggaggtcaggctgcagagggcttcctggggaatttccttttgctaataagcagtaatggagagccaccgtggattggtgagtagagaaaacagtgtttaatgaagacaattccagcagctgtgtggagggtggaggagaggaggcgaggtccaggcgggggatgccagctagagtcctgcactaagcagtagccatggaaatggaaaatgaggatccaaggaaaccatgcggagggagaaccggctgacattggcatggagtggaagtgggggattttggagagggggccagtggaaactggtgccaggacagtgtgccactggcaaccatagaaatgtgttggcgaagagatgctgattgaatgaagggagaagggagaggaacagtgggtttctttctttttttctttttcttttttttttttttttggtcttcaccatttccaatattgggagaacatgccaggagagatttttctatccaccactggagatattattattcaggatgatggaactgtagattgcagaatgatcaaaaccagtttgtaactgaaaccaggtgagaaaatgagcattcaagggagtggaggacggagaaaaaacagaatggacgcttgattgaggcttgagaaaatggtggcataagtggagccgagcttttcagcctcagcaatgctgacattttgcgatgcctcattcttcattttcaagggctgtctcatgcatcctaggatgctgagcagcatcccaggcctctacccctgctccccactcatgacaatgaaaactgtctgcagacattggcaaatgtcctttgagaggaaaaacagcccccagtagagacccatgggttagaggtaatattgatatttattagacatttataatatgccaggtactgttctaagtcctctataggtattaatgtatttaattctcaaaactatatttttaatcactgtattactattattctccattattcccaaataaggaaaccaagactcaggagtgatgtaatttttcaaagtttccaccactaaaacgtggcagcttcaggcagtttgactccaaggcccatgtttttttaccaaaaggctctactgcctttttgtggcaagaggattcatatgcaaaagcactttgaagacaccacagggggactgcggagagggtactgggggcatggaggagaccccaaagcatcaggcctaaggcactaaaagaaggctcatactacctaagaaacagggaccccagagagaggggctgggggaagacaatgaattttgttttggatcagtaaaggttttagggtgaccacactgaaagcagcagtgaagaagcagagaaaacagaacttcctgatgtcagggaagacaggaagtattgtgtgacagcaaagtccgtaatgaagagacggattgggtcaggacaaaggcagttgtagctgtaaagaacaaaacaaagtcccctctgaagcatccagcaaacaaaagatagacatgagtgtttatactggaaagagaatgattatggacctttacatcaaagaatgatgatttctcagcaaagtgtgatgacaccatcaactgagaccaggactatggaggagagaatgctcagagagcccatgttttgagagtggggtgggtgcttgtgaacaaaggctggtcatgccgtcattcgtgatgatgggctctggaagaaaggattctgacgactttttttttttttatctgcccttagtagtgtgagtgacagaacactaaaagcagatatgcctgcaagtgggtgggtcagtactggagaagctgaattccagttcgaggaaacagagtggcaggggagggaaggaagggaagcaacaaggaattctaagcccaggagaaggaagcattagagaattccacactgagaggtaaggtcagtgatgtaagtgaagtggaggaagcaaagcctgaagtcacaaggagagaggatccagatcttatgggaggggtgagagagataccatagggaagaaatgctgctggacacctggacaaagaggcaatgtggaagaattggagggcacatttttgccggtaagtggttgatctgcaatggaaatgtgcaagaatccataaatccaacatattaaaaaagttaatttagtgtatattttgaaatatgtaggagaaaatgtaacaaagtgcaaaaatgttgaccattttaactgaataactaaataaacacttgttttattaaaattagactaagttctttccctctgggcaatctgggcaatccacttacaatgaaaaatctaagagtagttatttccacagcatgaggagctgtgtgcataaaattagagggttgagagcatttatttaatcaacccaccacatcttctagaaacgtaggtccagcggaatggcagacaagaatcactggagtcccaagaagtcagaggctgtcttcctcccttagagtggaggttgcaggcagcacggctcaggcacatatgagacaaaggaacgggtgtgagagaggtggtgggagggtctggaagagcaattctcagacttggctgtacattagaaccacctgagcagcatttcaaatatgctggtccctaagacagaaatcagaatcagtgcccttatgaatataccctaaagttcttataccctgtgaagaaatggtttttcatttgtattctcagattctgtctctctcatacatacacacacacacacacacacacacacacacacgtgcacgaagctggctcttccacacagtgagcggcagggagcatggctttgcttggcagctgcttcttcttccagctgcatctgggcttgaacccaactgcaccgaggaaccaggcgggagcagagggaggctcacgctcttcttgtctccacatctacttcatgcccacccctgattccagtaccaaagtgagatcaagacccaatgccttaaatatataccatcccttctcccatggaaacagaagggcttcacaaagatcaatatatccaccagcctgcagttattcaattcagattttagaaaattgcattcgttttgtataaaagtaaccctgaattgcctatgctacaagtaggcaccgtactacaaataacctaaaaccagaaacaatttgaaattgatttatatttgccacttgaatgcttgacattctgtgaactcacaatgcttaattcctttccaaaatgtctgtttgccaccatttacaggcaggagtgagacaaagagatgtacaccaagcaaatatctgcccggcagaggactggattatcacagtgaccgtaacacccaagcaagccttggaggctggcaggcgggcgggcgggctgacctccacaaagaagtcacaaaaactccctggagtccagacagaacttcccaggggggcagagcagctgtcgctttctgattctcccccagaagagtgccaaaattgctgccacctcgtcgtccgctaggcaaggaaggaggaagggtgataggcactgtccctccctggggaatgcagttagacagaccctctgtctccccctggctgtcagagaaggcagacctcctttcagcccctcacccgccacctcttccttttaccctgtttttctcatccttcctcttcctttattctctccctccctagtttttccctccttaacacacaggtggagaaaaagcagagaagctgatggaagttcaggtcctggctatggcactttcttctttttcatcagtgtcaccctctctttttaaaaaatttccctctttccttgctcctgccattctctctaataacccgaggctcccagcccccaggtctctctggatcgcccccttggacacacctaatttctgggcttattctgtaacactcccaatttcctgaggctctcctaggcactcggtttcatacactttactccatctccctcatcagcagaaatgaacgcacccagcttctgcaattctccgcggcatgacagctgtagtggagggtcgttgaggcacaggctggggtaggcatttatgtaagaaaaacaaaagaagatggagaaggccagcaaggaccatcccttttgctttttcctaccgtactgagaaatcggcagcgttactcacaggatatggacaagagaggcagagagctcagttccaggcgctttacatacttcacctcatctaaccttcacataacctgcgttttacagcagaggaaaagctggcagtcaaaagttgaaatgccctacccaaagtcactcggtggcaattccaggattctgaactcaagtccctttgacatcaaagacccagcttttgactcccatgggctgcctctctggggagtggcactagggctcccatctttacttctagatgttgaatattcaagatctaggcttgccttggtgtaaaagccacagcagtaccagcccaggatcctgagggtgccaggactcagctgtccttgtaaggcactgcttggcacccaggacaaaatagagacaaatctcccatggtgggaaaggtaaagagagaatccactgaatatcaactttgagaggggaggagaaccttacgagaaattttaagaaatcttcaccctggggtcctgatggagacttaatctctggctgtggctagaatttgttctcagggccttagacaagagtcagagtccattagggtggactgggaggtggctaacatagtagacaattataaagaaagctagtattcctctattccaatattatctgaatcacattcatcccttcctaagtacttgcatcccctatccctgggcggtcacgttggctcacccgtgtctgggccagatagctgggctcctacattacttgatttctgccaccttaaagacaccatcaattctgccttcttctctagacatttttgcccaaatctcagctcctggtttgtgtgagctcttggaggataggcattaaatttgattccacagcaaagaggccctgcccttggccacaaaccttcataaacatcctataaatgaatccatgcggtgggttaaacttgaaagacaaaaaagtcaggattgcaaggaaaagctgttctccaaagtcttcaccttctagagacaagtaaccagaggaatatttgccagggtgtgccctggacacatagtccagagcaagggctcttaacctgccattcatagatgggcttcagggatgctaagtcccctaataaatacttcatgtggaatttgaggcattggcacaaaagtagatttttcagggaagaggatccagaacattcattttgggaattgctgcttcaatgtgtggaataaaggtcagggtagaagtgggaaggcagcaaagatgaagcgggtttgggggtcaaggagggcagcatggacttcacaggctgtaagccaggctgtttgtgacggcagcggtgcaaagctgactcgcagaacacctcattcctcagcaggagctcagccttctttgttcagacctgagaagcaggcacaatacttaactgttcccacctttgttgagaatgttaatataggttgggtccaagctcccccaggtgagaaccacatagcatctttggcattgccctagctggcagccactgccgtcactccattttgaccaccatctatttaacccaccccattttccctgtttagaaagtagaatctcaggataagccagatcttaaacttttcttacttttccttaattacatatatcagttcctgcagcctgccaagcctgaaatcctcacagagccccagatctaataggatttgttctttaaaaagtcattttgagggttcctagccctggtctctttaaggtaactgaaaggtttgatattttttgcaacctagtatttatgcttatgagtttgtaatttctagccatcatctcttttttcaaagaaggttatacactggctctcagagatctttccagtcctctgtgattttcccaaatggcagcctttggccctgcactggccacttctttgttaaagacattttagaatctgtcatgaagacctggggttatttatcatattctccttaattaatgttttaaaatcctctccaattttatgttggtcttgtgttccctaactcatgctagaatccagattacacaccacacacacacacacacacacacgtgtgtgtgattgtatgttagttaccagttcccaattatatttctaagaaattaaagatatacttcttgttcttatgaagatggcttttactgctttccctttaatttctcatataactaaagtttttcattttttatttcctaatcatcttttctaaatataaaaatgatatgctttattgtggaaattttggaaagtaaagatagagaggtaaaatggtaataattgcatcgctcctaaagtcttaaatcttttgcatgatatgtcaatctttcttctcagatttcacaacttttaccatttctgaagatgcctaccttcccactgaagtggctttctttttagaataagacctttgtttatccgagcaggatccctccagactttctcatctaggagagcaagctgatctcctaaactatctcaaggcacctgcagaggagaaagagccccggacatgagattcagaaaagctgggcttgaattctaggtttttcttcctcttgacggcataattttgggcaatcattagagcactttatatcactagagtactttgtacctcaatttcctcacctttaaaatagggttaatagttcatgcccagaattcctcctggtgagttcttgggaagaccaaataatgtatgaggaagacagtatatatgagaaagctattgacacactatcaagctttagaaatgtaagtgatcaatattattacatccaatttggtttgtctttgcctccgttgtcttccttcattgaaaaccttccttttctttctcaagttttggcttgttttagttttccttacagtttttcatgtgtgatcagttcatggtgactttgtcctaggctcacttgaaactttaaatcctcaattaattggtttccatttgtatcttctgcatttttgtactaaaaattcatgttctctaaatattctagaaacatggcacctcgtggccagattgtcttttcttgccagatgtaatttgatgagatactcaaagaagtcagacttgatctggaagcttctaattcagaaatgactgctggccctctacatgggacaactaagcatcacactgcaccacccaaactagctctgatcgaatacctagtgggttggaaacaggggaagtcacgataattaatatttatacaatgcctactctgtgacaagtattgttgaaagtgaaataactcacctgattctcacagtaactctaaaaacccagaattattaatactccatttgatggataaggaatctgatagtacagagaaataaagacattttcccaataaatgaacaagggtcagaacataaaccctggcactatgactcctgagttcttgctcaggagaaaaaccaccattttctgcctctgccaccatgttacactgcagaaagaaaggtggagaagacagtagcagggaaaatgtaaaaaacccaagatgacagcaaggagctgaggaagtacaagtgctgaaaatacaactcatttcaccttctgcataactcaacaattacattaattacactcctgtgcatttctggaagactgtcttggctgtgtcctatagctaatgagcacatcagaagaaagaggtccacaaatcattcacagaagtccaggtcctaaccacctttcgaatcctgctgtgcacccttctctttctccactctcttcattatgtagaaccagacacacagtatgtttcttttaagtctctgagcatcaagtcaaccataaacatttactacaaagcttagagcaaagagtttaagagtgtgaacttgagccaaaacgcccagttcaaatcctggttgtgccatttaagcaaagcaagcttttaatgtcttcatgtcttagtatcctcatctgtgaaatgcagataaatttacatacctctatggatgtttgaaagggttaaattggtcaattcatggaaagcactaagcacagaacctgtaggtgctcacaacaaagtagcagccatccattaaacatctatggtgtgccagcattctgttaggcacacaccaggacatgagggtggatgctgtttctccccttgagaaattcacatcgggaggtgggatggatagagacacgatagcagtcctttcacatcccagggtgggctatgggagcaggaagaggccagtgattccagtctgtgggcgacaggaagacctggagctgaggatccctgagctgaaacttgcaggcatgaggggaggtggggagggcactgcagtcagagcaagaggcatgagcaaaggcctggagtgtaaatcagcctttcacagtatcccttgcccctgcctgtgtcaccatctccatctctttacttcttggatcatgtaaagataaaagataagcctggaaaaaacagtttcacacataaagctagaaagattagttttgctctcctttctgacaagtatttatctagttttctcaataaaatactgtgaaagagaacctgggaaggagacatagaccaaagattaaaaactgcaggtcacaatgtctaggtgccactctgcattcagaatgctgcgtaccttgccactcacggcatgtcttgcccattaaatattttccattttcttgttcactgagagtggatgcattgaattcaaggccacatcatacattgaaaactggctatttggagcaggatgcagttattaattattatttcatatagcccatgtgtatattacgcttatggttgaggagattttttacatttcctcattcagtccacaaaacgacatctttacaggggtcaacacgataactggctcccctaaagacctcattttacagatgaggaagtgagttcagcaaggttgtatagtttgcctgagtcacacagtgctggccagggtggggccaagatgggatctgctcaacagggccaaagaccagtgcctctctcctcaattccaccttgcttcaaattactgaaaggcctttttaaaatatgcatgtggtaaagttaaggcactccatgtggcaccaatatatatcctctttcataatagaaagaaaagatatggggaatttaacctttgtattttatatttattttctataaaactgccctctgagttaatagctgatagagatatttgaaacaaaactagctcactcacgtcctttttggaatttcctctttaacaatgatgacccctgttaatagtaaaatccaagcacaaagccatacttaggactgccattctcttgcacttaaccattagtctctattcaaaggagtagtttgcaaatgggtttgagaaagaaatagatgcaagaaaatggagaatcttcaaaatgtccaagattacatgatcagagagaagtagattgttccttccctcttagaggaaccagagtcttcaggttcagagttgaaatatatttacagaatggtaggggtaggctaagatgatgatactcaggccttagccatatgtgaaatgaatgagatgcttatggccagtaccatgagtttctcatccttcatcctcactgaattaaattaaggtccagaaatcaactattttgtagggatccattttttcagtttaaaacaactttgccttttaccaacagcaaagccccaagagaagggatctagaagaaaatcactttagctgaagtttccaagtacaggctgtttatgagttccccacatgcaacataaacctttatcttttttaacatggaagcaactctatataatttaaagagtcagggcttagaatcagaagatgtaagttggaaccctagtttgctccttatagctgtgtaacattcagctctctactcctcagtttatctgagaaacagaaataatgtcagccttgtggtgaggattgagtaatgtgcattaatataatctagaagataattggcataatctagaatataattttccatagaaatttgtctccagcaaaggcaaggcaattcctcatagataactatatttagactgacagcaataattcttagcattttcattccacttcttgtctttaaaggatatacaaattctgattacataattccaggaccttctcactccttttcctaatctctgtctcagttgcgtaaatgcagacttatcaataaactagattgcctgcaatggttactgaaagatcatttatgagtttcagtgtcaaacttgaattttatgttgaaatcaaagcagctttgtaaatgggtacataataaaaaggagaggttgagaaggtaaccatgatcccatttattccagacagtccaggctggagtgcagtggtgcaatctcagctcactgcaacctctgcctcccagattcaagcaattctcctgcctcagcctcctgagtagctgggattataggcaactgccaccgtgcccagctaatttttgtatttttagtagagatggggtttcaccactttggccaggctggtctcgaactcctgacctcttgatccacctgcctcggcctcccaagggagagttcacttctagttggggagatcaagcaagacctcatggtggagcctgcctttgagatgagccttgaggaatgaacagtatttacatggaatttgaaaggaagggcaatagcataattagtgatgagagagagctttttgaagaaatgtccatatcgaacacaatgtgaaaggaagctcaaagaactgaggcactaaggaatgagtatattttcacttcatcagcctaaagctggcactaaagatactttcgtctgttccactctagtaaatctcacccaaagcattaagaggtgcttggatggcaaggaaatagaaacataaaaggtataaacatgtcagctttatcttcaatgcacgttcatttccatcatcatctttaccaacaaccaatattttctgagcactgaccatgtgcagagagcactctgctaaccactgaggacataaaaggacaaagtcataaatcttgtcctcacaggaaaataaaaaattaataaatttgatcactttaacaaatttgatcacttttaaacaaaagtgatttctcttctacatgcaggctctaaacacacacacacacacacacacacacacacacacacacatccagtatttctttcttcaaaaatccaaagggtagcattctcctactcaggaaagatctttcaaatctgagcacctgtatttggccagggtagaatttcttctgcagtccttcttcctatgtgaactgaaggaaaaaccaggatacagatgtaaacaaaatcaaataaaaactgaaatattctccattccccctcaagctcagaaacaattctggagcctctaacaaggtgatgagaggaagaaccacgaatcacaaagacagcaattgtggctccacagagctcacgggtgaaactgatctatctgcatggtaacaaattccagggtaaaggctgcagtagctccatgatttggatgttttgcctgtgtggggccagccagtagatatttgaaaaattcaaatcgaggagtatgcgtcttagttttctcctaaatatttagtgcctcacaccaccacacagcccaccaaacaccagagtccaaaccacactcataccctttctcttttatcttcaatggctattagcagctgtccaaaagagaagtagtgtttttattcttttatagtttgtctttttaaagacacggattcataaatctgggttttttcttgcctctgtacatttaggttcacatttattttaaaacagggaagagagtaagccaaaaaggaaggatgtgagaaaactattaacccagccagcctaataatcagtgattaaagttacagtcagagaagaacgacatcttgatgcctcctaccctcttcctcctctgcgtgcctttaatattctacttcaggcactgagagggagggcaacagggctagtgaattccaactagcactcagataattgcaccattcacacccctcaccaatcaatcaaggtctgcttagccagccccatttattaatagttttcctacatttacactgttacaaaggaccgaaatgaggttttttctccgaaacaagaaatggggcaccctcaataaagactaagtggaacagaggatgtttgcaaaaccaagaactgctcgccctattttgcagccacacctgttttaagggcgtcaggaaagcattctccctaagtttcctaactttcaacaccaggccagtgttagtgttgagagagcttcccttaattcaaaccccagttccaccccttgggtgcaagctgtagactaagtaccgtcatatcccaacagcatttttttttaacttctggcccagggaccctccactaatcatagaacagtttaacagtgacaaggtcttaccttcatgttaaaatgctagtgtaacataatgtttagagctaacaggtgccttgtcaatcatcttgcccagtcattctcaaatatggcttcgcattagaatcctgcagggaagttttttaaatgaccatcgcctgaatccctccctgagagatttcaatttaactctttggggtagggtctgagcatgggcatcattcttttctttgttgttattcttgtttagttttttgtatttgtttttgtttaagctctgtggatgattttgttattgaagtggagttcaaaatcactgcttcagactattgtcactttatggaaattagaaaattgaggtccagagtcaacggtttgtacatggtcacagaataaagcaacacaagcagaattaaatataagcttctgactcctaagaccaccacctcctaagaccaccacctctttcattatcatataggcagctactggacagcctggaaaaacctaacatttttaaagacccattacatataagagagaactccggactctgatgctatgtagatgagcaaatgcacaccactggctgatttagggccatgcattccaagggggctcttgggggcagggcacgggaaaggaaagtactgaaatgagggtcagtggacgtggctgaccacattatgtggctttaggccacatggccaaccttaggactattttcacagtttttaaagggtggttgtcgaggaggacacgtaacctccaaggtgactgtcagcattattgttctattatcctgtgccacacacagagaccacatgcattattgtccctaaattgcacacatttaatgcatttaagattttggggcctactatatttggtaggtaagtcactgcacaaacatatccatccacacacaagtctaatatgcacaggtgtgtggggggtgtgtggatttggatacatatccaatacactaatctcgaatccaaagtacaaactgctatggcatctgtgtgaccagactacggcccctagaaggtgggaggattagttaagaatgtcggccattttcacagagaacaattagctatgggaaaaagaatgagcgtcctcacctgagcttcaggcttctgagactctcttctcccttcctgtaaccatgtagtgcttttattcagccattgtttttaagtcccccctcttaaaaagaaacaagatctgatttcctaagaaattctatgtggttgaagccctgagtgggtctatataaagattaatgggaactttaagcttgacatttctttctaaagaaagaaattttcagtctgagtgaggcagtgaggaaagacacagaggatggcgtgtagacagcatagtttgccgttggtgagttgagtgagcagttcagagggttaattcattgaaactttaattgtcttaatctaggaagctcctctactacagactttacgctccccatcaagctgggctccaaggagggccaaagcctgtagcttctctctccttccaggtctgccattcacagagagctggccctgcttcccctccaccgccttctcagggaccctgggcacagcctcatcactgtgcctcccctgctctgcctctcaagtccccttggaatgcctgactcttaggtcagtcaatggtgggaatttactcacccacatatcttcagatccagggtactctctttatatgtaatgcatctttaataagtcatcaggctgagcttaggtttcttctgctaatgaaacaaatacaaaccacaacatacaaagaatggtgaaagtgtagataaatggtaaaaggataaggagcagaaaaagatagaaaataaatttagggaatcatccatttcaagcccatcttcccttaggcaccaatgctatagtttaatcaagaggtgactgaaggtgtctccccagcatctccacacctggacatccccaggagtaaaaacctctaaaatatcaagccactctaaatagactaccaaaaagcattttgtgaatcccctaggaataatgggatccctcttcatccatcactccctttgccattacagaaagcagctggtgtctgaagggcatggcaactttttacctccctactccagaaacacatgggctaggctggtccttcattctgagtagcttggcctgggctaggatccaggtttccctttggacacaaaccaactaacagctgtccctttctttgtaatggccatcaacagagttagctgcaatccagtggtctaagatgaaaactgtatcatttgctcattctagaggcaagtctaataaacaaggctaggatttcactaactatacaatcatgaaagcagaaattagagcctcttccttcttttaagacgaccctggctttattctctaaccttgtcatttgtaatctgaaattcctaatcaaagaagcagcaaattcctgtgttgttcttttccttgagttaagggatgcaaggaagagcgggaggcttgccttttacaccaactttcctcttcatatgctttctgtcctcctaaaatgacctgtctttctgtatcctataaatctcctattttttcctcaagacataatttaaatgtcaacccctccatgaagccctcctcactctcccagatttctctcctttttagatcttacctaaatatataattatctctttatacatgtccacaccactagatcctgggctacaccactagatcctgctccacaccactagatcctggcaggtacagacagagctaactctttttcatagcacaatattcttaaatgttgttgaataattgaacaaagcaaaagacatgaaaataaatgaagttaaaagaacagtgtaaaagagactaagagacattaacaaaaagataaactaaaaagcaggaggacataagaagaaaaaaaagaaagagaggaatcagttatgagaagcatcagaataagagagcacagaatgaaaagagagcaggcaaaagatgtgcataggtggaaagagtgaaagaagagaggagatgggtgaacttaaatatacaggtttctttctgatttaaaaaacaaaacaaaaaaagaagtgctggaatcccaaaagtagaatacaagcacaactgccaatgttctggtgccaaggccactaaccatggtctgtaattaaaagcagggatggtgtagacctgtgaagcgtggtccagcaactctggcgtcaactgatagctcattagaaatgcaaaatgtggagccccagcccaggtttactgaattagaatatgcagtctcacaaaatctccagatgattttaatatacgataaagttagagcagcactgacgtagatatttaaaatccacagataactctgcatttcactctaatcaatggcatggtgtacaaagcactggtgctaaagaagttatacaaccttaggaaaatcacttaatgtccctggatctcaatttctttattaaatgagaagttcagagtagatgctttctaaagtatcacatagctctgatattcttgatctcatctaacaacaaaattttaacccttcctaaacccaacagaacaaacaggtagcatcatcaactaattaatatctcacttcctttctctgttcatttatttaacattttctgataatctattatgtgctagtcactacgctaagtacaaatgattctaagatgaataaaacatctctccctgcccttgaggagtgcacaaacttcttagggaaacagggcatataaacaaagtcaggataaactaagaagcatgagcacatgctggtgaagaccagaaaggaaggcaattccacagcctggggcagccatggagagtttcaccaaggggacaaggtagacgtgcatgaggtcccttctctgccaacctctgctgaaagtactaggaagtgaaaagaccaaaaataaggtggagaacatcaagaaaacaactaaaggttcataaacacaccttgctgggttcacaatcccccaaaatgttcacagcacaatggattctgtgtaatggccgcaggcaccattaacagccgcaggtgaacctcaaaaacccaccttctctgagctatgcctgctctttcatcccgactacattctgttctagctttggcctccttctggaagatatcaattcaaccactaatctactctccctggagacttcctcttgtggttgcaaagagtagatgcactttaataaatgcgaacaattcattagaccagtaactcttttgatctatatttatttacaatgagagacaatactggcatccaatcatgtgcacaggagcagcgactgaaaatgtagtttactgaaaggaagaaatttctagaattcctaaggatggggtagaatggcactgaggaaaaagaggagcttcatttttccagctcagctacttttgactccaacaaaatacacaagatgagtggttttgtcggccccagtcttcaatattaaagacacaagactatcgtttggaacaacagttttcccatctttagaatggtgagttcaaccctggcttttttctcttccctagcttctacatgctgatttgggattatgatttcttcccatacaatttgtcctttcacctgtctccttttatagtccatcaatattatttatagcccataaatattaacaatttttttactttaacctgttagtagtatatatgtcacctttgttttcagattcttaaacaagaatatagaaaaaaaaaatcctgcccccagggtttattgtattcatggaggaactggaagaatgttttacaaggtaatattgtggccaagggatgcatcagctcagtcctgtttctcccaaacacccctcattccaccagccaatttcagtccatttgcccacctcccaggtgccccctgcctctccccacacaagactgggtgaatgtacatgaaggtcagggaagacagtcaagattccaaagctatctttctggaggtaaaccaagaacacaaaatcaaggttcctgctgttcatcccttctccagaggaagtcgctcttctcaatcagccttaaagaaaagcacttggtgtgcaaagtattgaattgaggattttttctctttcccctcctttcctgtcatttcaccttcttattgattctctctgcctgcgtccatccctggcaaaaattgcatatatacattagcaaagcatggatcttcagacagacaggcttcctagggatggaaccaacgggagaggaaaaattagacaatccagtggtactcccggctcctctcctcacatgtaacacctaactctaaactgccacatcactctgtgttcacagatccgccatgctctgccacacctgaaacagacatagaagataaccatgttgttctgcttctcttgaaatcacccacctaatgtccttaactgtgtcctgggaagtctttatttcccattattattacttttcttaattgcacatcatggaggttcctcgattgaaattaaatttgctcttcctcccaccagccgccacctttctttcccatgtcacccacattgtaagggggctggcagaaggagaaaagacaaaatagaacccagtcagctctgtgctgtgagggggaaaaagggggcgagaacaaaggccctgagatggctcagagcaccactgagtcacagcctcacagagactgcctgcgaggatggggaacacctgcttcctcatcagggtctccaaaatggctttgcatggtgaaaaggcacagaccacctgtggcgattcctccttgaatcttaacaagcctcttccagttggattacctctcctttccctttatagcttccccacccactttttcctctcttcctcaactccctcccctttcaacctcgcctagtcttagggacaactaatgatagcctggaacctggcttcatccattggcattcaagataaatgaggtagctgagatcctgtcaaacagcatccttgtcaaacccatcaccaacaaacgaacattccaaaggacctactgggtgtagagtactggtgttgtggcactggggatgcaaaaggggccctgtgccccatcaatgccctcctctccttgtccatctgtatgtatgaaagcattgcacatggagctgcctttctcacccatacctcttttctattttgaagtcaaattaagagttcatcctcctacttggagtggaagcagatggagaatgagttcaggtgtctctaaggtgagcacacaccagataacctcagtcatttgtagacgtggtgagaacatggttcaaagtgggatcccaccctctcactctgattacaccatggttacaaagtagcatttcagcagtaaaactcaaaagaatgaaacctagagaagggggatagtgaatttggattacatctatcctttctggacaatgaagaactatcatctactgtcatgttgagcgacaaagatctttcacctcttccccacatccctttggtattttggattatcaaagaattgttgttttaaaatgccagaaaaaaaaattgtgtgtgtgttggggtggtggtaatacttttaggaaaaataatgatgctaatgattctgctacatgtttttggagatctttatcccaacctgatccctgcatttagacgccttcagagttcagggacatatggtcagtggagcaaggaaaggagcagcccactcaccatcatggccctccaacccatgaatgatctgattctctcaagagttgtcttggattgcatgagtgactagctgaagagtcattagctaagtcttttccatttctcctgctatttctcttctcaagtacattaaaatactgcctaatcacatttcacatattgtaaaaattgatgaaagggaaaatgttaaagtattaattccatttttgagggtacaagactaatacatgcaaacagcacatctctttgtttaacacaaagactcacgtgtcgaattctgcaccccttccacatgcacagcattttagaactctgcaagatagccattttgcaagagtgtagaagtaacagtttgcttggaggatgtgtgggtataaatagatatgtagacagaaggagaaatttacagctcaaaaataatagcacaggaaaaaatacaaattaaaagcagaatattgacagaattcctcctttccgagcttaagatttaagtcgtttaacctgcagcatccttcaattccaggtgttctgagaccagcccgatccccacctagacctacccctctgcaataggcctcccgggatctctgggccccttgtcaaccctttagacagcaagtggatttcagggcaacaatcacagtaatctcaatcattatttttatctgttttaaagggcatagaaaggatgcctagaaaggtaaagacaggagacagggagagaggcatgaaggtgacaaggggaataaagccaacctgaaaaaaaaaaaaaaaaaggatttctagattcccataaaaatcggagctttagttctgggtgaataaaatgctatttaactggaaaatcacacaggtctcctggctggctatgtctatagatatagatacattcccctgatgccatccaacatcttttgtgcctgcatacatccacccccactgccccccaaaagcccaaaacctgttagatgagagaagaaaaagaaaaaacatgggagatttccttctttgtaataagccttttttcccaaaacagcattattttcatatcttgtgaccttttcttccaaaaagatccacttgagggactcgaagagatagataaaatgaggaatccctaccccaggtgaggaaaaaataaaatagaatttgccctaccttggtttgtagaagccaaacctctagacggacagattaagggagtgagcatgttgggaatgtccagtcccttcttctcgcttgcatatccacataagaaagacgaaggataaatgaacggaagataatttaaaatccaatttagcgtaaattttgttttaatcttgtgtcttgaagagatgcaaattcaaaaaaaaaaagatttaattcaaaggtaattcagggtatggagagcagctcacaatgcagaatccagagtaattattccgtgtgcatgtgaggttagtggctggaatagatttttaacgcttcttctggcaattacggtttttggtttttggagcgttagtggaggaggctctgtgtggagaagctgggggccggctccgtccctcggtggagcatggtcattcccaaagcgtccccttcctaagggggaaaaagaggcggtcagggcttgattcgcgtgtcccccggagggtgagaaaaatgcattccgaaaaagatatcaattcgttttaaggaaaggggggaggaaaccccgcatttcccacagagtgcacacgagaggaattgaaaacagctggtaccggtctataaataattcagaaaaggtctggctataccattcctgggacaggcacggatgagaggtgggaaagccaacctgaatggaagaggagagagggagggagcgagcgaaggagggaagtgggaaggaaggaggaagggggggagaagcggcaccatacagcaacacacactcacacacacgcagaaacacaattcccacttaactcgccagcgagtgcggcccccagccccatctgcattgctgctgacttgtctcgctcgctctccccatcgcctccagcagcagcgccgcctcccaccccgggcttgtgctgaatgggttctgattgtgcacggggtgcacactgggcatttcttggaaggggcacactgacgcgcgcacacacgcccccgacgcgcacgcgccccgcgcgcactcacactcacccccgcgcacactcacccccgcgcacactcacgctgccgccgcgctgaggtgcagcgcacggggcttcacctgcaacgtgtcgattggacggatgggctcggcgcgtgggtccggcccggggcgccgctgccctgcccctctgctaggtgaagggatgaaaccccccaaaagaccagagacagccctacccagtcacagcaccccctcccccacaaaaaaaaaaaacctttaaaaaagccacgtccaaattagcaagtgccgggttctgctggatttcagagctttacctcatgccagattcgttcacgatttcacggcttcgaccctttatctgcctgacacccccaaacccctacattcaaaggagagactccaaagcccatctttacgtaccggctccgagcgcctccgcggttgcagtctgcggagaggggtggccggtggctgggaatggagggttttcctttcctgcaaagcaggattaatgatccgtctcgggggttttgaagttcatgactcttctttgcaaggcaaaaggatatgcattcggacgccagcactactggatggtggtgatcaagaatcacccttgacgagcactctcgatagagcgaagccccgagatttcctagaggtgaagaagccggaggaagtggtttttgaaagggggtggggggaaccttcctttctcaaaaagaggtggggggtggagaggcaggagcccagattccagttggtgaggatcggagccgggggaagggaagcgggcgggggcaggctgtgcaagtcaaccgcgcggcagccggagagggagagcaggaggggaggaggggagcgtcagaaaaatgggtattaatcaccggggacggggggaggcgcggggaacgcaggttgcctggtctggatttgggtctcacactcaaaaacgtgccgcgcacacacacacagacacacacacaccccctacctcgcacaccctgactccggggggaggagaaacccacgaagctggggaagatactgcttctgctcccaggggcgggtgtgagcgcgc

SEQ ID NO: 7 - DNA, 458548 bp, Mus musculus
cccccccccccccaaggagagcaactttagttggaagattttaaaggagaaagggtaaggttgacagttgggtatgatctttctggaagtgaagagtcactgtgcagtttgcattcaggctcatatctaaagacatctgtgacaagaggcacagccaaaccaggagtggacattgatgcatgtaattccagctctctggaggctgaggcaggaggattggactttgtctccaatcaagtaaataagcaaaagtagaatgtgggggtagacattttaggagcaattaaaaagcaggtgtggggtgtgggggtggtgatggaccattacaggtgccacacgttgctggtgaggcctagtctagcccgggcagccctgccacttcagtctgataaagacgaccagtaccaactttagctgcccatagcttggctcaggagagtcactgtgaggaacccgctctgaccttcatccatgggtgagcgtgttcatctcctaggtgggcccatcttccatccctcctaactcccattccttcctgttaattggggtcctccactgccatacattccctgacgattgctgccaccttcctggctcatccttgaggctccggcagtctcactgagtagtgtgctctcctgacacacatctgtcctggcaccagtctagaggtggctcgcttgctcctcactgccattctcagaccattccacctctctcccttaaaacaacacagtgaccaaatctagagtcaagtgcatcaggcaatcctcgctgttctcctctgcctggtttggtccttgaaaccatcctgggtagccccttaacttatgagctccttttgcatgtcactgaagaatcatcaatcaaaacagacagaacccccaatctatctacctacttgcatctgtgaccaataccatagtctttccattataaatggcctgcaggcacctacatccagccttctgtttgtgcattggattccattcccttaagctcatcatagatattacccatcagcatcttctctttctaggaactatcaatttcttctctctactggatcattctggccatcacaaaatgggccatttcaaaaaacaaacaaacaaacaaacaaacaaacaaaccaaacaaaacaaaaacttccctggggacctcaacgtcaagcttggcctaatctgctttccacctgaatgtctgctaagcatcttaaggttactacaacatatgaaagatttcctttcagtgacacacgaggctcaagagacagaaacactggtgtgctcattcccagcacctagactgtcctggaatagggtttcaattgcataagcaaccttacaaggataaacatgtcctcaagctgcaaacaaatgctttccaagtccagtttcatagaaaagtaaagtaaaacaaacgaccactaaagcgcctcttccaagaaaataaataaaatgaaaccctggatctctgttacttatgcaaacattggcgtgacaaacacagagctcatttggaatctaagaattgatgctgggtttattattatttttaataattaaaaataaccttaatttctcattagttggttggactctgtctccatccttttctctgcttgtcccgtgttgcctactttccaaacgccttctgctaattgtagaattagcagatagaacattctcgagcattacttcatacttttaacaaagttggttcagaaacacatgatctatttcccttcagtgaggttttacagcttaggagatcaggtctgagtcaatgcattccatgttactatgtgtaagaatcaggattaaggcaatctgtaaaatgcctgtttgtaattgaatccaccaatttcctttctggagtaaacagtaatcagattataaaacttggtgttttcactggggtgggaagatgtgattgacctaagtttgtgatggcaagccacgctgaacttgaagaagatgaagaaattaaaaagggtgaactagctctgtactcttgatatattcacctctcctctgtgccctttggcttctcaaaatgagtaattgcagctacaatgatcatgtggcttttctcctcagaatattctagactggagaatggagacggctagtggggagtggtcctgaggtctgtagatgagtcttgaagactcagggtgtattgtttatcggtacctttctgtaaaaaagtctgagactgtttctaaagtcagtccacctccatgtctgagcaatcaccagcagccagcagtagcaggcttctccttccgatagagctcatgagggcttgggggtgaaagactattttttagtggggataaccagagtgtcttggtgtgaatattaccctcttttgtcttccaaactattcaaccccctttcttttgcttctggacttttttctcagcttggtgaagaacattatttcaaaaccacgctctgttctacttgtcgctgaatttatttctcatctatctttttttccctctcattttaatatattctaaacagctcgtacctgacatgcaacagctcattggtagaaggatttaaaaagcattggcttcctctatactcagggcagagctggagcgagcgtaccatcatcagtgtgctcaaatgaaaacaaacactctccatgcacagatccggggccttgaaatgacagagaaaaggagccagcgttgcaggaaaccagagctggggcaagagattaatgtgtccatgcgcacagaaatcatcttgaccaaagcccatgtgcacctgctcagtggctgcttaatattcgggagcacagctctctcctttacacgtcctcaggctcccacttgaggacactcactttctgggcactcgaccttgagttgaagcgtttgaggacgaggcctggtttgcctgctttcttactatttcctttcaactccttttcaaattaaagagtaacgagaaagccaatgagaaattactctcagatcattttccaagcagactgtctaaataagaactcagttaaaggagggcattctttgctaacaggagaacaaggtagagagggagagccgcatcaagaagtggtatcaggagctatggcaagaggcagggagggaaagacagatttccctgtgggaagaactggaaaagctattgtcaactataaaacccacttttcagtggctataaaataagtattatgggggccaatttcctagcatagctaccattcatgttgtaataatggcttttaaggggaaggtcttcagaggagggatggattatagacagacagaattatattccccaaagatgactgggatttagtgaaacacactgattttactcgtttgttgttgttgttgtttaattatttattttatgtctatttgtatctgcatatgtgcctgcatgccagatgagggcatcaaatccctatcatagatggtcatgggccaccatgtggttgctgggaattgaactcaggagccagtgatcttaaccactgagctctctctccggcccctggtttcactatttcttactaaatttctgtattgtattttgctagtatggtgtttgattggtgatgactgtgcagattttttgtttttatcatgtggcaggtaatatggggaaagaaacaaagataggcagagggcagtcacagctgcctggggatgtttggcttttggtcttggtctggtctatctctctgggaagaagcacatttggtatcccaggcagtgagctgaagacgaagagaataggaatatgccatcttgttccattgaaataaagatgcctcgaacctacaaaagcctttcggactttctgattagattacaagttactgggcatgcacatttgcacagggggcctctcttcttggtgttgaaacacgttgcccatttccaacctccacccagatatctagcttcatccagcaggccttaaaaccaaacaggttttcaggattgctcttcaatagaagtggtagatgacaggaggctaagggaaggttataacttaccccagggctcaatgaccagtgggtaagctgggcttaggaaaaaaatcaatctgcaatatgagaggaattccgttctgtccccaaggtcagcggcaaggagtttaggttcatgcacacactgctgctgaggagagagccctaggctctgagatggacttttacctgtttctatcttagcacaggaacaatctgtgccagccataacaccctcacaataggaagctactgtgattcttttatattttcagtttggctgctttggccttggttagatagggactttctttctaagacttttcccataatgcttctctgatctgtactgtgggcagctgggctcgagggttgcctttttcatttccactttaatatttaatattaagcacaggggctttgtggtttcaattaagtaattctccagccatgcccttagggtcctacgaatcctctttccattctaaccgacaatgaatatgagaatagcaccaaagagaaaatggccatctcaggggactcaaatgctccaacacccgtcagatcttggccttgatatctgctagtagggagcatcatgacataggtaatgcaactcataagaatgacaaagccactgtggcatcaaggtaaaataaatgggctgccccttttcttagtttgctatgcataccaacatgttcttatgccaggaagcaggaggcaaacaagggggaagagaagtgctatttgtcaccaacttaattctaaactttcagtgtgaggagcattcctatgctggcctcacttcctcttcccatgcatgggaatgaggaaccagagaaggtagctatggggggagaccttcagttatgattattaaacaatttaccattataatcttggggtgaaaaaaaagtctcatgacgacttgctgcagacattactactccccttcctttaggatttaggaagtcaatcatttattctggctccgggggacagcaggtcttttgtcaggagttccttgcacatgctagttgcactatacttcatgtacataatgtttccaaaaccaacttgtgccttaatattagtagtcgaatatgcttaaatgtggctacattagatacaatgacccagggaataatgtaaatgattctcctttgaagtagctatccctgtgggctagcccaaactactgacaccttcagcatttcattaccacctcacacatattcttaatagttcccttcctaggctactaatctgggaggtttggtctgatcacattccataagaaaattttgaataatgaaagttattctccatgtctaacctcacaagatccatacatcttgatttgctcttcaaatttccttcattacagaaaattttctgtctctgtttttcagatgcccgctttgctccactcattgactggcttctatagactaatggattatgggaagtgggcagggtggaaatctgggaagatgaattttgtgtgaaaggtttggttaaaacaactgcctggatttcatggcttccctctgttgtttggtattagaaacttggagtaggagagttatacatgccgcatgattttctgagacagactgtggtacaaaatccagacaatgcactatgcaagctttgacttaccaatgcatttgtacttcagcgtgttcatctgtataactaaactccattacgtttccatgtccaaggaggttgtctggagaaatggtgatggtaaactatcccatgtcttagtgatttcttttgccgtttatcaagactgaactcaaataactcaatagctgaactcattgccctagtcatttaaaatgcccaagagtctcgaggactgtgataaaatgattatttcctctggttcaagatgccttgttatttacgtcttgggcatcaaaggacaaagtgggggggttaacagaactatactggtcaggctcttgtttaggagcattaaatatcatgtacacattaatgttcttagctttttatcctaattgtgtttgtgtgtgtgtgtgtgtgtgtgtgtgtgtgtttgaggggcagtggtaaaatacacaaacatgaaagtactcatagcaaagtgatcatctaattacatgcaactatgagaaggacatggaacctatttgtaagactgaaagtacaattcagacagagacaacaaggtggcatcagctgtggcttgctaatgtttcttataccacgtcgaaacattaaaatagctctaattgcaaaagaaaatgattattgataataattgactacaattaactaattagaattaaaatgcggcaatgactgctacacaaactagtctgactagggctgaggtatcagaaaggcatagtactttgttttgttgtttcgttttgttttaaaaggagaaacgaatccctttggagctaagcagtaccatcatcttaaggaagcaggcccctgtgcgctttcacatcactgtgatcacagcccctgcagctcctcccctgtcagagccaatactgtgaacctgctcctgccaaggtagacagatttgcaaaggttagcattctacagcaaggatggtaggacaagctgtgctctctgtgcccagggtggtgagcaacaactctctgggtgtcatccaaaggactagggcaatgactcagggatgacaagtgaccagacttcctgtaagcatctagaacctcaaggataaggctgagtccagctcccttacctcaggtacagagttctctctggatacctcccctggcatttcaacaatggctcacacagcctaaagtccccaagtactttgaaatgggccattagaaaatgctttgtaatataccctagatcgaatctgtctcccttttgcctctcaggttacaaccaaaagaggtaaacagaaaggagaattcttccctcctttgggagactcctggaatcatgctctcctgttaacgtgaggtttcgaaaattagctgtggccaaaggaatgggctatgggcaagtctggtcctttgggggttccttacttcctgaagggaacctcaaatcagggaccatcaggctctcagttctacttgtgatgtgaaggttagaactattatgggcctcttattatttaccctttacaggtactggtaaataatttcttacaaagagtagaataagacaatagaaaataatcatggaaaacttcatgcagtttgttgacacatccactggtccagcagaaatgcccgtctttgagagaacagctgtctgtccccacagccactagttagtaccagactgttcctctgcttaaaaccagtctcataatatcataagatggactctactttaaaatgttaattatccccattgctaggattaatattatctacatctattagaactgacaaaaataaaccctacccctttagacttaacattttaacttttactagattcctcctaaggtgtcacaagtttcactccagcttgccaataataatctctcgaccccttcctgtcttgatgaagaatgaaccctgctaggttttttgaaaaacagacttgtcattgcctgtaacttatttgagttaggttcactccagtatgctttaaattagcactcagtggcagaagatgcctcccaaaggagaataattcatgaccaatgacatcatgagatttataggggaagctgggcaggagaaagaaagagaatattacctggtaccagagaagattaagtaaaagtataggactagccccaagagttctttcagagacagaaatggacagtaactagaatgaataggtggaattgttcagtaaaactgagggaccaacagcaaaggctgcaggaagacagagcaacaagaggatcatcaggccagtggtgctacactctcctctagggcaacgaatctaatcacatctaaagaaaagaggaattgagacactagaattcttctggatcaagtcattaaaattctgacgtgttctcacttgagatgtgcatgtcagaggtaatgtgtttaataacctcagtgccataaagcctcagaaagggcaagaaaagaaagtcatcaagccaaggggagaagcagaacaaatagcccctgaccccgggtctgggccacctggttacaaaggtggcaacttccagcactcagtgcaatcctattggatcacaaatcctattgagactcacaaagctgagtggttagtgagcttatcttgtaacaagggtccaaataactcaaactgtctaactcttgaaacaaagacctgtcaatcccagcatagatcatactgtgctcactcaggacagtgacatgtcccgacatcagctctactcacctcccatttgatcaacattcttcgaagtctaatcttctgacatttattttgtgcacaaccatcactgcagagacacattaataaccatgaagtagccaaagaagaaggacttcagagaatgaagcatgacttggagaaatacacatttccactggaaataagcctgtggaaatgcacacacatgctgtgagtgtactactgaggctctgtgtggagaaaaagagaaacgtggagtttgtggggcaagaactcatccttacatattcctgtagattcaaatattctgtgggtaaaataagtgaactcattttccattgttatttataatatcaaatattcactagtgttcttcatatacaagacacccaattaggtaatataggaaacaatagactactaaatgtatggcttgttcagaatctggtgtggggaagatagcacacacaaccaaatcattatgagggtggtctctgttgggtgccatccaggagatataattgcatgtcatggacattcataaattgcctagattttttgtgcagagcttgtgaaggggaatatatgctatagttgtttgtcgttgtttttgaagatttaaacagaagaagtggattctgtaagagaggagggtgaggagagttggaagtagggaatttggggaaaagagtagtttaagatacaagccaatctagctggctaaagagtaagggacaagtttgtaatttaactgtcctgccacaaggacaacacaagggaacatggccatcagtcctgcttgttggaaaaccatggccagggtggctcattaaacttgtttctgggactagggaggatgtgtactagctgtcgttaggacaggcaagctgatgagagtagactgaaatataaactcttcaaacaatgatgtacaacactgaaaccatcaatgaagggaagagttaggaggagcaacagaggccaaaccaactctagagtgagaaccaacaggctttccaaatgattacatgtgcaaaactggggacatgagagaggcaaaaattcttggcaaaaccttagtgtggtgagagaccagtggtaccatcagccagaaggagactttctaattatgttggtttgaaggggccaatctgggtatttgagtcaatgtaaggtgagattcagtactgagctgaagagaaaattagggtctaggagtgaagacttgaattcactcagaaccatgaacgttataggagtcagaaagattttgaggagttaagatagagagagtcaaccttagaatacacgccaagtcaaggttgagcagaatcaggaagcagcaagctcaccgaggacctgagagctaagatgcacatcagaatggaccacctcttgatgcttagctcaggttaatgtctacacatgagcagcagagcaaaagaaagaccggtgggttttgtagcaagatgctcattgaaatattgctgttcggtgtttgtaggtgagtagcagattatagactcattgcaaagccgtgtctatgtggacaccaatgtccacattgggtgtggatgtaaagaaagactatccaattgagaaggccgggagagcaagaacaaacagagattaaaaatgggcattcaagaatctaatcaaacggagagaagatttgatcctacagttggtttccaagttttgttttgagatgaatatagtcagctgggtggaagggagtaaaaatgcaacatggagaagcctgaagtgtacctcaagaaggtctcaagggcaggggttggtgcacagggatgaagagtgttcagctgagaaactggcagagatgagtgaggaatttcaaggctgtgatctaagggaatctctgagaatttagctctagaatgggttgtaatcccagaagaagtgacgagggcttggccttgatgtagaaatgttgaatctttgtggtattcttaaataacatgatggatatctttgacacaaaccctgacaccagaaaatattaaaccttcatgtataatgagaggactttatgcacacctatttatatagacacaatacatacatgtaaatagctaacatttgtgcatttgcacagcctgcatgaacataacatactccattttaaaaacttttatatgcttctcagcaccagctcagggtcataataaatgctcaacaaacattggcttattttaagttacatatttatgtaggactttttaattgatttttttctttactaccctttaaatcacaactgtaagatgattattaactgacaaatagagctcaggttagaagccatatctttaaaataacagttttgtaatggacttagattgtaactctgacccttgcactaaataccactttcacttttgccaaaatccatatgctctacggcagcatcccaaggctgtgaggaactctaccgttcactctactttccactctcagttcccattaacagcccccccccagtcacaccagcaaatgcaaaatgtgggccatcaccagcagctcacaattattaactctgatatcaatgcccaaggacacagtggcagagtgatgcacagattcctaatgttctgtatcccaggcatcactatggtaacccaatactctcaaagcaaagttacttccctttgcttctgtactactacctagagctctctccaaggcattataaaagcacagactttcacttaaggctttggctggggctttgttgttggagtagagaggtaatattccaagccacagaactcacagagacgggatatgactgagaaaatgtggttagaacgggatggcagcaggatgtaccattctgcctgtgaccttatagatggctgcctcctcaagtcagatggaatcctagacccagatcaatactagaagccttcagaatgacaaatgtacactgtagcatggactcaaccatatcataggcccacaggttaaatagcacccgagggtcaattggctccttcacagggaatatggggaaggagactagaaaagtttagaatgcaggcaagacaattgagtggccgatcatttgatcaggaacagagaacagattcttcagtgattcctacagtatactaatgggttatgtactaaatgtgaatgaccgtttttctttacggctttctcttcactatcttgtatttgaggagaggtgtctgtcttttgcttcccaagtcacagttcttacctgctctacatggtgttaaattctgctgtttataaactatgtacatgagtgtgtgttgaagaatcaacgcccatgtagaactcctaagccaggttcccatgggccttaactaaacaggtagagatgaggcatggcttcactgactagttttcgggaccctttattctttctccctgctctgaggttcatgatgctctacttgccttctcctgctggcttattagagtttatccccaggaaaaggaatgaaaatcctaatgtagattaggtgtttaaatgtacaaatccctaatatggcttagtatgtcactcttcctgggaacactttcatttcaacagcagatggacagctcggccctagtgtagtaaatctgtctgggaagccagcagttggcaggctcttctgggatcttgaaagcgagccatgggtcatttgcctttggtaaggctagagccactctggtatgactgacctccttggggtgcctcttgccctaaagaatcccttagacagcaagaacattctctgacaccaaggtgaagaaagcaaaggtgacgccatgtgttttcgcggcccctagatcccacaatttctatatggctttgggaacataccatatggccacaatgcccagaaacaccaaacacattcaccaataaactgccattacatcatgtatgcgcacacatgaatcattcctagcacaccaaaacagacactcacagggtgccaagtaaggacagggccttttcagagacggtgatcaaaaaaataaaaataaataaaaaaaataatgacaatttgagttcaggaatagcttttccaaaggcttttgcccaaatattatagttaatctttccctaaatcttcaagttactgaaaaaaaaaacaaacaaacaaaaaccaaaccaaacaaaagaaaccctagctcttaaatgagaggtgcaggtgaccagcactctgcagagaattctccctggggcaattcctgatggccatggaagactgggtgagtggtactcacatcactgtatagaagactcctattttacacatgcgtttgggcactactgacaccaccaacatttaatgggatcatctgggagttttgccccaatcacaaaatggctgtggccagtaccagggaacacacattagggacgtttcccaagtgctggttgaggatacacagtgacagcttggaaataacaaggtccactgtacatgccacactccgagagggtgtgcacatcttcacttcaggcaaattcaagggtcaggttgttgaggtcactgggcatgcgaatgggtcagcattgccactaaaaggagtgatgcaggaccacacccatccacccactcccgcaggggaagctagcactcatgagagagagcatggattctgaaggacactgtggaacataaggtgctctcagggctctacagaacctcacagttttggatggattggatcttggtccgtatccatcagggatggagatgggagccactgctgaattcttaggcatcctactggcttgttatgatggaattttacatctataacttgacagacttcattttcttattcattctagagtaggccatgaagaccgtactttggtcccaactccagtatccaggtgaaaaaaaatgatcaattgaggccaaataaggggtttaggatagttaaatttcccagatgacagtctctgatggtaagagaataggggagaaaatgcagtatgttgggtatatcaatttaggaatggggggggggaggatgggggaggggagagagaagctgctatctttcacaaagccaacaatccagtaaaagagattctatttgtctggttagccccaaatcagatttgggacacctgatttgagcaaaatagcaccttcctaatggcagtaacaagaacaaggtaactcttaagccaccattgatactgtccctcacatacccacttgcccacctctataactagttttagctatcttgctagttttgagggagtctggggaccttttctagaaaagcatatatgtctgtaagacccttgtatccattgctatccctctaccagcctgaaaccacatgcttaagtaaaattagtggagatttcttgggtgtgcccgaagaggtcatttctacagggaggcacaggtagacggatggggcgctccgagctcgggtaccagagcatgaaggatcagaatggtaagatgattgttgagtatcagagaaggctgctgtgagattcctcggaacctggcttcctgaaacctctcagccatgccaagaaaggaggccgctggacctcaattctttttcaagcccttttggggaacctttgtaagcctaggtactgacagagaaaaatctgatgccaccagcttgtttttgacagattgatggtttcctatggtctccctagaagacaagagtcagaccaagttttgcttaatactgatagagacccagcaaaactcaggtaaagtgcgtgctcacttctcacagatccgcaggaagacaggtttcagagatggggcatggacataaatggctttcccctggcttagtcaccatagtggcttctgttcccgttaactttttttttcccagacactctgaaacaaaggccatgtcaaacaatttccccaactgaaaatgaaaacccataacgaaacaatcccccctcaatcccatccccaccccactccctccggctcaacaccctgaatactcacaggagaacactttatctatacaaaattaattagaaaacaaaatatttacataccaaataaacaccatcttgatttctgtggcctgtggagaccaccagagccccctgttttctagattgctgttcgctaggttagttggtttggttttttcttttttttttttcctttttttttttctttttaaaattttaaagggtgagaggtaagaggaagagtgggggatgagcctctggcccttggacagagccagagtgaagcaatgtttctatggcccttctccttcttcctctgggagacgcctcacgccctctgtcctctctcagagtctttcctggaacctaaaataaagcactccgcgctcctctctccagggtgttgagaggttcagccccttgcccccacgttcattttagaaagaaaacaaggccttcagttggcatttaaatgagagatactgaggtaaaaaaaaattaaaaagaaatcaaggaggaaggtgggagacagcagtcgagtatggggatgaggggaggccatgaggcggggcgaccaggaaggcaagaagcaggccaggaggatgtgacgtgaagagacatggcagcttcgttccagagaagaataagcacctttctggtttatgtgtcctgtgtgccacacggcgatcctgcagtcaagcttccacacagacccagggctctttggacgccaccctgtgtgaggggagggcagggcagcagaactgacccatggaacacccctaccccaagtttcaggtcgggcagtgacaaatattcatttcccttcttaattttccaactttaagtgagggggcatcacacctgccagcacccccatccctgtagttttacacacacacacacacacacacacacacacacacacacacacaagcacacgcacacgcacacgcacacgcacacacacacacgcacacgcaggcacgcaagcacattcactgtcgagtggtacaatctgagagggaactggggcttgtcgaagcgcttgcactatttcaagtcacatgcctagggacccaggctcccacttctcaatccttcatgctctctggctttccagggatgtacccttggcgatgagctcatttctctcccccacgtgtccccttgacacatcaccaatccagggggaatttgcttgccctttcagttctaggttaagtaagaagggatcaaagcattgaaaacatccccctttctcactaaccctaccgttaatgactaaaaacatccccctctctcaccctactgtaatggctctttcacaaagccttatacgaagagctttccccaaaacctcatccagctaaggggctgaatgcctagattctaagtatgagtaaaggactcacagctatttccatttcccttcagccttactgaaaagctctctctgcccaagctggtggaaagcattagcagctactgacaaagtattctgtagggttgactcagttccattcatttccttctgttgtcttttctgcaatatggattcgtcttcatcaagaatctctataccttcactcaagaaggaaaaaatggagagatagcccaaattggggtgacatcagtttatatataagccaaaaaaaaaaaaaaaagcgcattgctttcgtatgtgggaggaagcagccagtcgaggtttcgttctctgtattcagaggcacctgactacgtgtgagtgcaggtgtacatgtatatgtgcatacacagtcccatactcttgcttccaatgcaccatgggacactgtagcagtgaactacccacttcgttcaggaatctctcttctaccaatggcttctcccttggttcaccacccctgaggcttctgaagctgaagaaagtttttattattattattatctttttggcttatatatatacaacgacttcctgccctctgcttggcacatggcccctcagcagatgccaaccatgcagcaagaattcagagaaagcctcttctctcttaggagcaggaggttcaatggccttccttagataaacaccttcgcttccttgcctgaacaaaaagagcagtatcaggaaagcctcgctcaaagtgaatcgctcagagcccttctgcgctaggaagaagcacacaggcagcgcttctggtctcctctccagcctcccacactgaggcccgttctatcctcttatgggaacaggaatggtggacagacgcgggaagaagagaactgcgcaagggaggagaaagggtgctggccacgagggttgccttcagtaaggaaccagaactccaggatcccatagagaaattaaaagaagaagaaaaagcgaatgggagccaagttcacccccgactctttccgtgacatgcgcaccacgcggcccacagccctatccctcccgcacccatcttaatctctctctctctctctcttccctcactcagacatcagactcaatactagaaagtttctcataaacatgtccattgctggagccattgaaagccctggggtttttgttgttaggcacacaggggttggactggttccctatacaaatgtccttctggaaacgacctggcacagccccatgaagggctgacaccactggcttattggtgacaagggcccggaagtccggccttgttttcgacgcccctgccaccgtgggctgcctgaagaagtaggatttgctgccgtgaagcaagcactgatcatccccaaaagtggggatgaaagggttttgcgtgacccggtcagggtagagcgacttgctgagcatgtagccgctgccgggattgttgtgatggtgtccggcagtggtcactgaggacttgttggcaaaggagctctcaccagctggcatctcaaacatatgggcgtaggggctcccatccatgaatcggcccttgtctttcaggctcacgctgcgtggggccaaggcggcctcctccttctgcaggtccacgaaggtgtcgtaggagtgctgccggcgcagtttgttccgattcttcttctgggccttggaattagtcgggctttgaggatacttggtggtggaggcgttggatgacacagccacaggggcagcaggctggtccagttcctgcagggagttgtcctcgctgatgtcatacaggttgccagccttcttgcaggcctcacacctgatgcaggcctgccggcccgagttttgccctgccaccgtagaggagtaattgtgcagcttggagggacagctgcggcagaagttgcccccagacctatcctcccaatccacattggtcaggttcttctcccaaggagcaggcaccccgcctaccactccgtgcttatcgcctgttccgtgtttaaggtgagacctgttggtacagggcccgcctccactgaccgaatctcgcttgaagtcatcactacgttctttgtaaatgtcagtcaagtccacgtgctcccagtgaggcgagttctcctttgttcggaactggtccaggtagaagtctcggagcccttctttgtccctgaagtagcgcttgtggtctggggagcggggtggtcggcgacggtaggccagctcgatttcatcaaactccctcctagatttggccgaggctggccgcttctttagactgtccttatattgctgcttcctcctcttggctgcgttgccctcgatgttgccataggtgacagtatgcgtggagatgtctgagacatctgatcgaatcaagtcatcatggccactgtagcggtcactcttgaaagagaacttgccgtacaggtcgctgagctggctgtgtttggaggagggcaggccaatgtccaggggtttcttgctgattgacctgggctgggtggtaaagggtgggttgtcacagtcatagagcccatcaatggagctggtgctgccgatgctgtggggccggtggtgatggtgatagtggtcttggtacacattgctgtccttcagctgcaggttgccaaatgttctctctacctcactaatgtagtcactgaacaggttttcctcacagggtgggttattgtacgacttgcagtctgaatgcgtgaagctgcggcgatgctcagagatgtcatagacagaggactcacggcggatgaagtccagggcactctggggggagccgttgactccagacaggttggccatgtttttggccgttcggagcaagcgtaggatattggagtgtgtgttgttcatggtggcagtgggggagttcatcacggattggcgctcctctatagctactccgtggatacagctgtagataccctgaagggatataggatggtacacattgaatttagagaaacccaaacacaccataaacaacagtgccctaccactgatgatttaatgaggtaagacaaagataggagaatcgtgaggcaggcagtttgctgaattcacagaaaacgtgactagaagcttggttgatgtagccccttgaattcagccaacttcatttcatgagctaacgatcataatctgccatcagggaggggagtgatcataccagaggactcaaataaacagaggacatggcttacgtgcctcaactaaacccgcgatctatcttgggtttccctcctatttaggatgcagagtcttacattttataaagggatccaggctgtagacatatagcaaaaagcaggagcagaatattggaagcaccatagacactagagccacttagctctggtcggccaagcctggctgatgctgctcacagtggcttcttgtttctggctctgaccgattttgaacagttatttttttagaattttgatcagcaaataacaagggagcaatgttgttctgcagctaagcatgaactgaattcacacagagagttggaaagccctggggtcaaagaaggattttctactgctgtggcctacactgtgggagggaaaaagtgggacaaatatcaagagctcaatgtgaatgaataactcccttgttgaggtctctcctttattcaccctttaactcttgctttcttttttatagtcaatattatcataaataattaatgttctatcaaattagtattgatgaagaacgccaggcaaatagctacttgttcggggcactgaaaaacagcatctgtgaggaaggctgggttgcttgcctgggcagacagtgtccccacatctcaagtcaggtcagctactgttcatctctcatgtgctgcttgaaaggcaaacaaacttccctagcaaggtgaggcagatgaagaagtggctttaaacggtgtctttacacacaagaaggttagtctagaaaagaagattatctgagcggtcaggaccgagaacagaaaaggtcagagggaaaaatggtagctatgtggccaagaagtgtcaggccttgtgagacacaaggtcttcctggagggcactctactccctttctgcttcttatttctgacctcttgacagtggtcaggaagaaatgccaagtgtcctcttctgtgaagacagtgcccatgtcagagggccacaactaaaatgtctcttttctcccacctctctggcctctaggaagtgctgaataacggggcccagggaccaggagccccacaagctcctttctcctgttcttatgtgactgaatgacctgtgcacactgacagctagagaggaaatggagaaatttttccctgtccctaaaacactacaggaaaatgtccagaaaatgaaacagtttgatgagaaatccattttctttcataactctatttgagtcatatctgcaacacgatcttcaatcctaaaaggatatttgagttcaccactccatgcgtgagtccacacaactatgtcaacaaaatcagaagaatcctactctttaaaaacttcccatctgtgacccgagtttcatatatctaactgctttcctaatacctcaatttgaatcagaaatgaaggtgatctaaacaaagaatggcctggagtcttgttccttttaagtaagtttttgtaatatactttttaaaaaaaaaaaaattaatcaagacttgggttctttaggctctttcaaatggtatttatatctgtactccacagacccaggcacatacacatgcccacacgtgatcctcctgctgtagtcttccagtgttggtatttattgtgggcatatgtcactgtgtccaccctttaggctctttaatttcccttacttcacatgtggttaaaatataggaacagtaaaaacaccaataatatgtctttgtgtgttagaataagctatgtgacactatgctatttaagaaaatgttatgattcctacctcaaaggatgaattgattaatgcagcctatacagaatcaattagtggtggtgtaagaggcaaatggggaaaagccaaatttgatagaaaaatcaaatgtctgagtctaaaatggaaggaaagaaacatagcaccacccatcttagaagcatttgaaattctctcacacagacccttggggaagtgcccgtgatctggctttatgatttagccacataaggctggaacaagcaccttcttggtctctttgctgagcaaggctgaactgtccttagcaagctctgagtatctcaatcaaaacacttactctgctgatggagaagaccatgccaggcttgccagaacagacacccatgaagcaatgtcggaactgccaatagaagagatgttcacagatgaaggtgatgaggctgagagccatggctgcccccaacatatagaagacgcccgccatgttgtcaatgtccagctggctgctcataacctcattcttctcattgtggcaaatgccagtgagccagagagcttccagttcttccatctcccctagaacgaggacaagaaggagacagatagaggagggagggaggagaaaggtgagaaagaaggaaggacattgaagaagggaatagacagaaaggggcaaacacaaaaagagaaaaagaatacattttattaatgccattatatcttaactcatcaatacattccaagtatttagtggaaatgtaatgaatggaacacaggtaactcaaggacatgggacttccttgtgactctgctctagccagtgcaaattggcagctcaatgcttggtattatatacaatatgccatgcaaggaacaagagttcaaattagtgagaacagtttgtgagaaaagcagtcaatgggtttgagagggagggagagagagagagagagagagagagagagagagagagagagagagagagagagagagagagagagagaaacttgagactggggatggattttaatttatattatatttaaaggcattgcaggcagcaggtgtagaattatcaccaaggaagaagtagaaaaatagatgctcatttacagagagacaagaaaaccagttcaagcagagtagtaaccctcagcaaagaaagcttagtaaaagaattctgaggttaaactctctgacctctattttatagacagtggggataacataaccaaacaagtaaaaacttggaattatacagagcacattaggttgaggaaggagaggtagacagagattgaaagaggttgaatcattatgctctctcagaatttcagaagtcttttagaggaaaatatgaaacccaaatgaggaggaagctggaatgaaacatgatcacctaaacttgcctcctctcaactctgcttaaagggacaaggacttctccagttgtgtcagactctgacctactatcactagacactaatcagtagaaatgtaaacatctcaaacaacacccccaaaacccaaaacccaaaacccaaaacccaaaaaccaaaaaccaaaaaccaaaaccaaccaaacaagcaaaagacaaagaaaacaagtacctactccaggatgtcactaattcatacaaatgaaagtctagtttgctaaaattttgcatttgcatagcacaatgaatcccaaaatcctttctactgatctacttggtaatagagtctggatccatttggctgtgactactggttataccagcatggcttatcagcattccagctacaaacccctactcgttcttatagaaatccactcacgtttcttctcttctttgattcaacaatgctttttctaactagtgtagaagccagattcaggtggaacctggaaacctgaccctggccttgtgtctctgatgtcttccctaataaaaaatgtcccatggacctagttgacagacccacgtgtctggtggacttcagaaccatgcagagtgaagatcatctctatctagattagtttgtgtgtgaggattatgggtagactgttttgggcaaggacatgaagagaaatgcagaagatagtagtccggtgagatacatttctcagtgttcagcccatgaccagaaagacacaggaaatgccttctggtatctacatctgaggatccttgccctccacctcttcaaccagaagaccgtggcaggacagaatgaaggatgtagaaacagacaaacatttgtttcactttccttcctcctggaatagaaagagcactgccctacatctgtctggtgttgtgccacatgtagggtgacatctaactgtagcctacttcattcccggaggcatcaaagtcccacacaatcttcaaatgttcccttatctccaactactttaattcctccctcatctttacccagtgcaggttaaagtatgtctccttgtaattctcatattaaaccacacctttatggtagcttagggtgtgatttagaaattgggtcattgcagatgcaattaataatggcaaagcacactgcaatccccagcaggcccctaacctcatgtgattggccttaagaaaagggtggatgcagagaaagatgaatacaggagaaagacattcatccaggtaggatgaaagtagagatctgagtggtgctttgacaagtcaaggaatacctagtggaaccaacaagaagagagcaccaagaagacacatcaaaagccattcaacaagcatacagaggattcctcctcatcacttccaagtgaagcttcctgtactgatacctgtagtgcccagaacttcaacacaacgaattcaactgtttacatcacaccattcctgtcatttgttatggtggccctaagaattcaaaacgtactctccaatctaatcatatcttgtgacatgctgatttggataaatagaggataaaggttgctatttcagaacagctattggtggaggccaagtggacactcccctttactttaactcaccatctccaaacagctgcaggatagcaaggtccacctggcgtttccaaccagagtctttttggatagcaatgccatagcccgtagaagcaaagaccttgccactgccaatggtcaccagcttgcagccttcgtctcttccagccatgtagttgagcacggctgcatcgtagatgaatgcatcaagtttcctgcacaagaaagaagcgaaccaacatatactaaggaggaaattacacaacagtactacctactggggcattagtctgaagtggtagggttgcagaagctatgtggaggactggctcacagtaaggctcaagttggactattgtcagagtctaaagcctgcatcccaggctgcccttgatgggacttcaggttgaaaggagttgtttcttttattcccccctcccaccaggagtgataagaatgtaagttgggcctgaggccaactcataagctgtgtctgaaaaggagaaggagtaaaaaggaatcaataaaaataataacagaaataatgaaaagtaagcaccgcagtgataacaaatagcacgggtaagagttatataacatttttcatttctcagttcattacagtccagagtgggggaaagtgtaggtgtatatgtttcagtagatatgtggctattttggtggtcagaaagaattcagcattctcttgtgctgtgtgactctgctttgaggggccaggctggtggcaagctcgtgtgagagcacattcacagcactgcaagaaggtagcattcagaaggaccaaggactttcagattcctaagcctacatgcacattgcgtgaaacattgagctttgcaaagaagggatgcaccaagaaaagatggggtgggctaagagcgaggcggcatgcaccaatcactgtttccaaacgtttccacaccgaaaggctgagggagcagttcagataaagccatgcaagtgacaggcatgaaagtgagcagggcatgcaagcctgcacaacagttacaggctaggcatctttgtcactcctcaagaaaaagggaaacaaacaaacaaacaaacaaacaaacaagcccacaagccctttttgatatgactagcaacaggcaatttcacaaaatgcatcctataaaatgcaggttggtggcatgcccaaacaccaagcatccggtataattgagaactatgcggatcccgtagtttggactatccagagcactcctaccctaacctcagatcctgtcttctgaaacctgttgtgattttgttcagaacagtgagattgaatgcctccacattctaaatggccataaatctaggtggtacttgggaaccttaagacgcaaaggtggccagaggaggtccacggtcaccataggagagagggaaacagctgtatgacccattggcctccaaatttcgacatttacagtgctcaagtgctggccattcttcatagctttcactttctccaactaaaggacaagtgtgcccaaatcgctgcattaacagcttgtgaacaaatacactctgggtacagagaatggctatcaggagtgacaatcaaagctgaaattggggatcaatcaacacatttctacttgttgccgtctacaaattttgcacacttcctgtttcatttctccctagacaccggaactgtctattacacctcttagactacagctcatgtgtaacagatatgcgctctctccttgacgcttcctttttagtttttgatctgtttcttttccactccatgcccacattcatgcaagcagaaaacaatttgcaggatggtatatagaagcaagtaacatcataagaactcttgtacaagggttggaataatgccatcaaatttgacttggaaacagtcttttgatttaatgagtatggttcaagttcaaactgtgtccagtggatgtgagaggtgtatcactctgagcttggaggccgttcttaccctgttttcagggagagcaaggcatcatctacacccctttggttgaactttcccatgtaggcatgcatttctgcatagttattacggatattcctctctgtgctgccattgggcacagtcccaaagcggaaagggggtgagaagtcattaggtctctggaactggagagagaaagaaagacagagagagagagacagagacagaataaagaagaaatgctttagaaaaatgtgaagagacattaagtcagcattagtgagtttataatggaaaggaaccgactataattcaccaaacacattagccctcactcaggagcagtaattgccttctggaagtggacttcagttcaactcaatttaatacgtattgttgagagatttctatttgcccagtcccgagtttaatctgtaaccctgtgtgttccttctatgcatccgacacaataccagtgatgatgggcctgaaagtggcatgatatagtttgtggtacattagtcacttttatttccaaaaattgtctaaaatctgcactcaggcctcttaattcagaggcccaatcacattgtccttctacaattaaggtcacacagcatgtcagtcatggaaataatgtttgaatattgaatatattttgctaagaaattttcttttgaccttcaaagcactcaaaattctgttgatcctaaaccagctattggataattcacatgttattttagctatgttccctgcttgcttaaacactgagagtgtctctccagtgcctagcactagaatttaaattccttggatcctgtctctatgacatcagcgttattcatagctattacccttcaatgagttgggtcttaatgatgcttccagagcacacaatttgaccatttggattttcacagcctcaccaaattcatctctttaatacacactcacccttctctttgggccaactcagtttcttcattttaaaatatagctcaaagcaacggctttggggaacctcctgtgaattctcccttctatcaagttggcccaaaatgatccctcagtacttgttattctggtttagagtcctagattgattctataaattcagcgactccctatgtctactgactaagtaccgagaactagaccttcatgcggtcattaatagtttaagcttgagattaaaacagatatgatgaccaactctgccacttactacttaatgactgtgttccttgacagaaaagatgtacctcttcttcctccataataaggagttgatgatgcccagttttcaagaatgtaaaataagtacttggcacagcacctgatagatacaccatagggttgcctgacacaaaccaggtcactgggttagagggttttcaactgagaaaatgcctggagcagactgaactgtaggcgaatctctaaggcattttcttgattaatgattgatatgggagggcccagtctactatactaggtggtcctggatttatcaaaaaatcaggcttgaacaagaaatggagagcaagacaggaagcagcacttcgtcgtcatgatttttgcttcagtccctgcctgcttgagttcttacctttgcttccctcattgatggactgtgattggtacatggaatgcaatagccccttccccccatattccctttgggtctggcctttatcacagcaacagaaagcacactaagacagatgctcagtgattggtcccatattgttctaaatccatgttcatattagttttgttttgctgataaaacagcaggctacctaatgttcttgtcctgtaagtatatctaagatgacacagaatatgggcataaagctgtcccttggcatagaggggacactgcaggtgtttaaagtgctctggatttcaatgctattgctattatttgttaccttggagctgtatttgaaaacctagcccactaaccagggcccactgaactttataaacagcacaggttccatggcctttcttcttcttctcagagactgtgagggcttcgtgggctataagattcttacagcacaaggagctattacaaccactgtagctgctcctgttggccacagttgagagttgggtcagtgtcatatgctgtggtggtgggatatttaaatgtcacatcaaaaacagactttccaactggaaaacccttctcttgagatgagcacgataaatgccactactagcctctctctctctcttttttaaggggttgcaatttttaagcaaataaagataggagagtcagaattgtcttctcaaaactaagtagcttaaatcttccattggacaaatgataaagaggggcccaatgaggataatttgttcactatcacccaggggtagtggtggcgaatgtcatcagcattttccctggcctaattaagagtgactcctcactgtgcccggcagagagcaagcttacagtaaacaaggctaggctttaataaaagagacagacaccagaagacttcacacatagctgtcaaacagaactcctcagaaatctgaagaaacccatcccctaaatccaaagccaagcggatggcacaggagggagcagcccccggagtcatgtgactgtcctgtcctctgtacctctgcactttgctaagtcaatgggtacgaacattgactagggtactgcaggtccctcccacaatagtttctgaagtagtattgaaagctggaatcacatccaattcagatctgatagaaattatttatcatctaggtatttttgaaaagcttaatgcatgtaaggtctgtgcaacgatttttgatcaaccaaacggaatcccgtgcccagtgttccacttcctgacggagctacaggccaagacacttctcgttccgaaccataatctttttttttttaagttttaaatgatgtttagagtctctatattattttacagtcacatccatagatgcacaaaacatgtcgaaacgtggacctggaagagcaaacaccctttgcgaagaggggccacactgatggaatcaatctgaagacttcccaaggagctccagagaccttactgcactggtataacactgatgcaggagaaggctggcagaatgcagcagctgcccacagccatgcacatggccagtgtgaaggaggctcagtggagataggcgagttgtcaacaaatggtgtgaaggtgattagatgcttctgtacaaaacaaagctcactccccacccccacaagatcaatagcaattacgccgaacttgcgaacgttccaggagaaaaaaatatatgggaacagttttgtaacctagagctagatgaagactgtacatcacgtgtccaatccaccaacagagggaaataaagataaattaaaggtcatcaaaattcagagcttctctttaaaagatgcagttaggattatgagaaggtaagccaccagctgggaggaagtatctgaaaatgaattaaagcgatttcaaaaacaaatcaggtaatagcagaataagacttacatcatttagggcaccatccccgagcaaataaccagagaaaacaaccctgactacaatgtggacaaaatttagcctggaggcgatttggtttagattcaaccttttctcatgcttgctgtaggaacatgaacacaggcaagttacctagccttgcaaggtttcattgtattctggaaatattattttaacacctaagataataaatacataggaaagcacttaacactgtaagaaagctcaaagctgttagtttcttctgtggcaatgcaattctgtcctgtgtgaggcagcgctccctcattctctagtctgcccctgtaactaggccagtctgagggcctagagtcagccagagcagatgcaagagaccagcttgctgtctcctctgaaaggtcttgttcagctcgatgggaggtttaaataaagcaggtcttttaaaactgtcagtggaccttgaacttaactaaaattcccattcacagggaacagttagtatgcttaaggagacctgtggggaagaaggaaaagacaactcccacatgccttgatgtttcaataaatgcccttgtcatgaaactcaccccaagatgtaaagccctgttgtttaaccttggtgacagttgatggactctggggaggaattaaaatgtatactatgaggaatataaattagaacactaaagaccttgacaagtaattttaaaaattaggacttcaaataagccagggagaagaataattagatttgaaaactctgatttcaaaatggtgataacttaaaaaaaaaccagcatttttattaatcacctttgaccacccaaattgtgactgctaaaacacagatccatttagtgaaatgaaagcacaggagggaaggatcctcagggatcaggcccatttcacagatgaagacaccaaagtaatggaaaggtgaagggtattgctccaagctgtgtaaagaagaaagacaaggcaagcctctccattgccagctgggacgctgctgagagtcattgtgccctggctttctgggcagagaggccatgtgttgttaatggggccacctgggaggccatccatccatttctgatatcacaattgtttgcttccaccctctcccctggatccaacacctgctcttggcaatggctatgaactcacagtagcacaaggggtaacacagagggagagcgtcaagggaattgtaatctcacttgctcttcctgaaaaacagagaatcagaaatcaacaccttgagcctttagcatctgaacctcagtctctgtcttgatgaccttaaagtggattcctcttgacagtcagccatgcaaggaggaagattccaaggatggggcaaaggccctcactttctgttggactctggccatttggctgccaccaccctacaaaaaggtctctcatagagcttgtagcaaagaaaaaaagaaagagggacaaggggcgtgggagggtctagtctagtttgttttcttccagtcaactaaatatgtcagttgactttcccaagtacagggctctgttaatccagtggtaaaagccacattcattcaacgcctatgaatgtgctgtgaattagcacctcatcttcgttatctatggtaattagaatacagcagttcatttggagtggagtgtatcaagaaaagatgaataaaacctccagtttctaggaactaacctcccagaagagtcagaaatataagtgttctctgccattcacatcttctcatacagtctctcatttatatttgtattcaggaagtatttattctgtgcagacaaggttctaggtattggcaatttggcattatagaataagatccagaggctcatatcaaagaaggagatgggtaacatactaacatgcatagaaacatatgtgtgtgtttccatatatggacattgacatatgtacatatgtgtgctcaactatgtggtaggctaaagttggtcacatacattttgccagtcctcctatcaaaagggaagcctgtgttccctctcctaggcagaacaggtgacctgacatggaaagattcagaagccccgcccagagacttctggccttgaaaaatgagtgtgtgcttttacggcctcttcactggcgtcccagaacctccttccaagggaaggctcttagcatatagggagtattacatatctagtcttggggccagtcttaagccccagtcttgaggccaccaaactgaagacagcacctgtgggtgctcttcactgcagctctagcttgtctctcagctctacccattcctgccagcacaccagagaagtcagtaaagcccttttggtccctcaagtccagccaggcccagctctacccttaggtgaagatcagatgactctaccaaggccacataaagtcgaagacacactcagctcagctttacacagacatctgacccccaagacagtgaaacacaacgaagcggtttttgtgctgagactctaagcactgggatgccggccccacaatgaattactggtgaacgtggaatgtttcaagacaagacaaaccgtgtaatgctacagactgattggcagtcatcagtagacctttgtgagaaggtcacatttgagccgagacttcagtaagatcagttatccaaaacacatgtgggacatacaaggagcacaggaattggtcaataaaaaaggtccagactgctgagatgggcaacaaacaaggtgatgggagccccagagaagcaggactgtgtcagtgggaacacagggtgaacagcaacacagagggtgacacagaggagctttctatttgaacagaagaagcaaagcaatgtctacacagcatgctctgctcaaaggcacaatacagacgtcctaatagccacactcactcaatacctacggaatgacaaagctcaggcaccatcacagaccatggagacctcctcccttttgctacagccttataagtaaggctgagggctaatgaaggatgaggaaggaaacaggacctggctctcaaaaggagcccatatctatgttatgttatggttgggggtggggggcggtcaccacaacctggggaactgtgttaatgggtcacagcattaggaaggttgagaaccctgctctaaggtatgctaaacgggaggagagcctcgacacatcccagctctgccatttgatagccctgagactgcactactcgccttctctgtgccccggttcccacacttgtagagtgcacctatgcaccaagtgttcacctagtttcctgagcactgtaatagcacagtgcctggcccaggagaagcaagctgaattacccattattgttaacacaggccctgctatgatcgcactcactgtcactagcggtgaccgaacaattctgtcagaatgacaaatgtggggttttgtgatagaaagagtcctctgtcaccagcacatattccaggctggaaggaacaaattgaggagacgggagctcaagaggatctgagctctgagaagagcctgggcactttggtggggcagggaaagagagcaaggtgaaacttcagggacatttagtagtggcgtgaataaggatgtcccccagaggttctcacatgaaaacactttagtcctcagttgttttagggagggttgggagctgtgtgtggccttcctcaaggacgttgctgcgggtaggttttcagagctaaagtcctcttgctgtttcattactcctctctgtctgacttgtgcctgtggtccatgtgtgagcgctcagcatccttctctaacctccatgcctgcctgctgcctcgaccttgctatctagaactctaaccctctggaactataagcccaaattaacttttgttccacaagttgccttggtcatggtgttttatcacatcaacagaaatgtaactaatatgttctaatattctccatctcgttgaacacaaaagaccctagcgatgccatgactattaaaattccaaatcagaactgctgccatgaggccagggttcctggaaggctccctaaaggggacagattgaagttgcaaagagggaagtggaattttcaatggtgtgtgtgtgtgtgtgtgtgtgccattggaaagaggaagttctgaaagccacaccccagaccccctcaaggcctaggcctctgttgttctaggctgctgctctgacactgagaccttatacccagtggcctgtcacttctcctcaggaggctaacagatcaactgcagctaaatcgggcaagtgacaccacacagggaaagaggctctgctgagatgaaggggttggaaagtgcctttcagggtatagacctgcctgaaaacagctcttcttcagcctgtctgctcagcgtatgctgattagtgcaaaccagagtcgtgaccttgagctgcacactggacactttgctcacagctatgctgctagtgaggagggagctaggggcttttgtcttcagagcgtgacaatcccacacataaataattcatcctgttacttctgattctacatttgaatcacaaagagaatcaatgcccgaatgccactcagcccttctaggccctcggggggggggggggggggggggggggggaaagatgggtgggttcttcacaatgtctgtgtactgatatgaactctacagggaccctctttacctgccctggattcctctcaccacccctattaatgtcattaccgtccatcctccacagctcttccaaaccatggactttagacatcattatcatcactgatgagcatgtctatgaatcttagccctacatcagatcttaccatcagcactgtcaagttacaatataatttcaccacccaagaaaactccctcatgatactcctccatagacctcccctggctcctgacacatgatgacctgttctctgtccccatagttttgacttttaatcattcttcattacccaggagtattaaaccaaactaccatactgcttactcccatatattcccatttgtcattggcatctatataccaagtcttattttcaaaagccagggtggggaagcccaccaaaacaaacaaacaaacaaacaaacaaacaaaaattaaaagaaagaagatgataacacagtaaacttgggaaagatgtgacatacagacggtctgttaacaatggagggcaatttcattctaaaatgctatgtgtatggattgcctcaaggcacaaagatctgttccagtttgaacttttctattttgaaatgtgggtttcagaacagtccctcaaggcgccactcaagggtcagcctagctgtggagacagtggtggattaaacaatgggattcctcactgtccttaaagtgacagtatggaatggaggtaggaggaacaaatgatcacttgggggctgtagagaagggccaggaggtaaagtgcctgctgtgagttctagtccccagaacatgtgtaaaattctagggtggtagtggtgaacttctaaaccttactacctactgaggggtagagggaatagaaatatgcaaatccttgaagctctttgatgggtcacactagaggagtccttgagcttcatgccaatgagagagcctccctcaaaaaacaaaaattatggagagcaatggaagaaagataggctgtatcaacataaggcttcaacacttccatgcacccatgtgcatacacacacacacacacacacacacacacacacacacacacacacacacgttcacatgtccacactaacaagtacacacacatgcaaacaccaaaaatttcgccttacattttattataaagctatatttattattcattagagaatatattgttggaatttactcaaaggtggtaaataaatcactgtgacagcagcactacagaacatagcaagaagacatagattcataatttaaggtgacaacatgaattcaggtctgtttctggggccctggtgagcccaatgacatttgctactaccatatggtggcactcatcgagcactaggtagccccattgctctagttatctttatcaagtctctctctccctctctctctctctctccctctccctctctctctctctctctctctctctctctctctctctctctctctctctctctctctctctctctcacacacacacacacacacacacacacacacaaatacacactacacactacacacatgtatgcctgtacttgcatgtaggaagattggttagctggcccttctcctgtccctggtctcaccatcattctagaagcctccttcagaattctgcatgctatgctgttggggaagaagatctctgcctctctgggtccctgtggaatggcaaattaccccaaaggcttcagagaaaggaggtgagggagggaccaggcttctctttctcctgtcatcattctccattggggtttccaggaaacaaaatgccagctcttcaggtctcttgagattagctaactaccagatttcctcacaacaaggaccttgatgcagcaaaacaatgatttgtttggcatttgctaaaaatttaaataaacaaacatttgtttctatgtttaccacatcaattttattgactaggtctccatctgttccctgaggttttaggtgtttggcaaaatctgtgactttgccataaaatgctctcatcaatatggtgggtacagccccaggtatgtgcttgatctctgaagaacaatggcgatgtaccaacattacatgttaactttggactaatgatagtttggtgtcaatagcagcgaacatacctcccagcacacattatgtgctctacaacttgtatgtagcaagtcattaattttctcaataaacccatggggtagacatttttattcccatatcgtgggtaaggacactaacatcctgatagataattttggtcaatccttacaggtaggtgagagcagagaaagaattaaaacagagtccttacacataaccataagtcatatcacaccagaatacagacagaatacaggctcaggaaacagattgtctcaagaatccaaagatccgatgaccatgacaacttcccagtagcaaataggaaaagggaggactatagaaacttagagcacacaagaaatatcatgacgggggtagagctagggtggagaaacctttacacacttgccttgcttgactgttggcaaggggcttgtggaaggcatctgaccaagtaggctttcatgaacaaaggcaacatagcccatgagtacactgtgtaccctgaaggtgaaaggaatctgtgtgtgcaaatatgatacatgagtatgatacctggatgaaggccactgcttgcacacagtggctgaccaggccaaggaaagacccagcagttagctgaattaggattaaacataagggtatagctgggataacaaaggggctgtgtaagaactgtctactagagaactaccaacttgaacttaaatttatggtatcataatgggcaggtataagtgaaaagggcgccagaatggaaaaccatgttcaaatcaaggaaggttctatccttgctcttcctctaatgcccaggtttccctcctgaccacctggtagttgcagaacacatcgggggttcctgccagagcccccctcttctctgtccaagaaagccctgagtaactctgtgtactccctcatttctaccagctcaatcacatagccctcccctgacctgctgaggggaaactgctactccctgtcagcatctatatattgctctcctctcaattctctgcccttcttccatttacactgtgatgtaacaggcaagatttttgcccgttgtactcattggtgcaactcaagtgcctaggacactccctgactctaactagagtctcccgatgaatgatctaaatgatctaataaattaatgaattggattctgtgcattaagcctcaaactccacttaaagtgcttactggttaatgcagaatcatgcaacatgaccgagtgcgatgtctctcagatgtactgctgggctgccatccccagtgacgaggagttaatttgtcctcatgtcagttgaggacatctttcttggcacattcttcatttttccttcaaaaaaattgtatcagagctgagatcccataagagcttgtcagattcaggacttgacgatgtgtatagatatttcattggcctcaaaaaatgtgacagagctgggaacagttatgataacatgaagatgaagtgagccagagacatgaggacacagggtttaagttttatccttcggtactcctgtgtcacagctagcctctgctctcccctccaatgttctttcaggcaagactgagctttctgccttcccacatcatgccagttccctgctggcttgggagagatcagagacgtttttccagattttgttagaagctgtgggtaccagcaaagaccaacggctcttaaagaagcctttaggtaaaggatggatgtagagagactcaccacagaatgaggatctaatgttagttgctccaggagtcccagcagatttgatatattgtggaaggttattagaggcccctaccagatatctctatggaagttgcctcgctgaatcacctgtatttcagttctcctgagagccaccattgatgtcttctgagacatgaagctgggatgggaacttgaaccttcaaaggactgtgccaggtgagacctctggccccagatgatcagaggagggacatgtcagggtaacaggcacacatctgctgtcctggcaagccatctgatcagttggtttcaaattgactaatggaaatgaaagcatttgtgtcaattgtcactttatgaccatttatagcacaacgggatttttttcctttggtcagtaaagttgactctacacagagacaccacagctggatgaacgtccgagccccaaggtagtctagtgatcccacctggcacattgcatccctcttggcttcacaatgggtctcaaagaccaggaaaacccccttggtaaagaaactggtttaactttgacacactctttcgctagacttatcctgccctgggtttgttttacagcctacccattattcccctctataaccttgtgaactgggaaatataacttagaaatggagatagaatcacttctatactacacagaggaagaaagaaaagccagagaatcatcagctgtctcagatcaaaaagccttccccatttatgtctcctcccaccctcttctattcactcagcacatatcttgggttcctgagctgctcaaaaaatgaagagtcttaatggcaaagataggcagggactttagctcctttgtccttggggattaagtcaagtcttcatacctaactcaaacatgagggacctccaagaataacgtattagaaggttagtgctacaaaactatcaacagtgagcgtgttaggggaaggaaattcagcattccctagtgataaagggttggatatccctctaaaccattagttcataattcatattttacttaaacatcatatattcaaatacattcagtgaacacctttgatgtatcagatcatatagctatggaagctatgttgggattcggatacaaaagaccatggataatttaagaaataatgtttggtgtgtacttatgctagaaaacaatctaagaatctactaatacccttaataatgcctttatatgagcctgtttggttgtggcttgtttcttgtccactcggaacgtagacggcgttaatagttcatttgggttggctgacttttgctgtgagtgacacacgggaaaatggcaggtgctctgcaaacacagggctggctgggaagaaggctctcccctctcagggaataaagcaggctcaacaaccggcataccatagagagacacactttactattcacaaactggagacaggtgataatcaggggctctgaagaggtctaatatctccccaaataaatcctgaaagaatactgtgacttaagatctgacaagccaaaatagtagcacagttggagaccctacttactcagatttcctcttaaatgtctgcctaatttaggtggcttgacaggaggagaaaataaaggtgtgaaaattctatctggaactgtaaatgtcaaatatttctcatctacattaccttccctttctttctccacagccatttgttatgaaaacatttctcacactcaaatagctatatggctttgtcttataccatgaatactatctgagtttaataactgtcttctcattcatttattcacttattcattcatccatccattcattcattcactcattcactcattcactcactcatccaataaactcttacctccactgtggttttagtctaaaaagaaaggaaaagtagtgggaacatctcaaatatctgtatatcatgccaattaccatgtgatttctattgcgaataaagaagagtgcagaagaagaaatttagcttagaacctttcctagattttaaatatcttttcccccacagaagcagagattgtatctaggaccttgaggatgctaggtgagcaatctaccactgggctatgtctccagcatctcagactgtacaccatatgcgcatttggtgacctgaggtctggcttctgcatccttggaagctcttgctgatgagactatgccaccagggagcacctcctttttaaatatagcccacagcctggagtgagttctcaggagaacttcaagcttacatcagagaaacacattaaaataaacttattgttttcatacaacactcaagtcctgcatcattccaggcttggggaagctactttgttcagaggaagcacatagacagaaggaattggattgctgccatggtatatcactctgaatggccagccatccttggagaaattatctagatgagtccatttcacacacatattttaaagatccaactgagaagaaaatatcctcattaatgaggatatttctttatcaacctccatgatatgacgattctactacaagaccagcagcaggatttctttatgggatccaagcattgcccatcatgtttctctgtcagtggactgcagagaagctggacttgaattgtgaacttgtgagccagaagctaattaatagaatgggagagagtgccaggatagctataaagagagacacccctcactgatgaatgccagccaagtaagttcagggccctgggttccagtcccagaactgaagaaacaaaaggatccttgtgagataggagatgtgcatcacagggaagcaggatggttagagaaagggtagcagtaaccattagagctgggtctgtggggtaaggtaccaaccacatgggaaagcatttgttttctgtaatatcactcagaggatgcaatggaagtactctctcaatctgaatgactgccgacaacactggatgggactggagtgctaggcaagtgctctgtcatcaagctttatcccccggacagaaaaacatcctcctcacagcctcttccagtgcactccccattcaattaattggcttctggttttcagtttcataaataattttaaagcagcctgtcttctctgcaatccattgacaaagaaataaggtacttgagagagagaattaccttatgttagtcccttttgttattgctattaaccaataccccacaaaatctactttggctcatggatttaaaaggggcacagtcggcatggtgcagaaagcagggtctcagcagcctgggatggcaggccacattgtttccacaatcagcaatggagaagaggaagtgaggcccatactaccaaacctcaaagccagcccccagtaagtcatttccatcagtaaaactctatttctgatggttctacaaacttctaaaaccagctggagacccaggggttaaacaatgaactttgggggggtgagagggggtttacttccaagtcacagcacacagaaaaataggcagtccaaaagaggagggagaatatgacaaggacgaagtttagtcagaacacatgcaaaagggttctcaccatgcaccacagcaagaaggatcaggaactctttgccaaaaccatgttcagaaagacagtgcgatcccagtggaccatgagagccatgtgtttaggatggagtgctgccttttaatggagggttaaagaccaaagtggggtaagacaagtgtttgggccatcatcgatgcaggttcattatcaacatggtgtattccctgttatgatttacaaataaaatttgactcatagaaaacaaagttagttcattaaacagctaagttgcggagagcaaggttttaggatgaaaggttaaatattttttttctttgttttgtgtttttgtttgggttggcttggtttggtttggtttggtttggtttggtttggtttggtttggtttggtttggtttggttagtttgatttttttttttaaaacagtttctctgtgtagccctggctgtcctggaactcactctgttgagcggggaggcttgaaatcaaaagatctgcctgcctctgcctcctgagtgctgggattaaaggtgcatgcctccactgtccacttttttctttttttttttttaacaagaaaagggacacccaaggggatgtctctgacatgacatttgttattctgtctagctttctgaaggatgtgattaaactcattctgtagacaaggctgaccctgaactacaccctcctgcatccatctcctaagtaccaccacacttggctcattctatgcctttggaactcattgtctgccttcatcagtggactgttgttctccatgtctctgctaccatgcaaaagggttcctgtgcatgtttggactatacttatattaaaatcatattctcggaggttaaatgagcatctcatttgctcacgtaggtagctccatttgaggggtcatccaataagcacatccatccaataagtatacactgagcaagctgtttctatatactaggtatgattaatataccaggcatcatctatacaccaagtattatctatatagtaggtatctatacactaggtatcatcaacatactaggtagcatgttaaattcagagagtacacagtcttaaataaaaattccaggtaaataatacaaagagacatgaactgatttaaaatgttggggggtagggcagggttttggtagaacttagactccatactcagcatgggtcttatgaaggctaggaccagtttccagagagaccctgagatgaaaacagctgttgaaaacagctgttccagagcataaggaaggatgacatcagctaagccagtggtcctcaaccttcctaatgctgcaggactttaataccttatgttgtagtgactcccaaccacaaaattgttttcattgatattttataattgtaatgttgctactgttgtgaattataaatagctaatatacaggatatctgatattcgacccccgtgaaagagttgttcaacccccaaaggagtcacaccccacaggttgagaacttctgatataagccctcctgaaaaagactatgtggaagaatacatgtttggctcatgaatgcggaagcagtgtcaccagccacctcaagcttgtgccaccacaccttccccactgtgatacacaatattgcttttcatttttcttccattgtgtgcaaaacaaagtcctccataagtacagggatgagtggcagtgtgctcgcacagacctgctgcttcctgcccttggttccagtgagggatacatagcaggttttaggctctctgtgataaatgagttaagacaagtggggctggagggtaaggctgtacagcaatggtgaattgctatcactcatttggaggaaatcatcctgacagtgtcccatcactcagacacgccagaagaatgtgttaagagtgatccgaccaaaagctcaggtggtcttaggggaaagctggggctgcagttaacactcaacattaatatgaactgaggacttaggcatgaggtacatacagttctgaccacttggcaagtaataaaccttaaatcaccacaaaagctggtgggttgaaaaccttttaccccctaactgggaagggaggctccagaaggtttaggaacagagcaaggccatagagcctcttgtcttgttttttctccctggtttttagcatctgcctgaaaattaagcttcagaggaaaagttaaaaaaaaaaaagggagggggagcatttagctgagcgtcacccaggggtcacagatgactgatgagctctctggagtctttgtcaatgtggctttataatagtggatatcatggatggggggggggcacatgattgctcatctcaaaaaggagcacccaatacaaatgctaattcatttgtggctttggaatgcaattttccacaggctctaagctaaggacataccattctcaatagttcattgctaaatcagctgttgaaaaacactaacacacttcccccagtgaaacagtactgcaaatggttagctaattaagggcaatttaatccatcagagagcagaagtttagtgttagtaccagcacatgtcctgggagcatccatcctttaataaatgtagccagtcactgagagcagtcctttccttcagagggggcagcgcgtgaacatcactgccagcatgtacacccatttcctgggccattatgatgtcttattccgttccgggtcccaaaccaaacagtctctgtttcattacacaggtgtgtctccaaaaccaatattcctcttctttccatctgaaggacctcaggcttaacagggagacgatctgaaaagatatcttactaacagacgagtaggtgataactttattcttctaatataaatgtaaattgtaaattgtattttaagagacagcttaaagttgctttgcttttatataaagaattaaatggggattttaactgcacaaaagcctttgtgatggtgagcttggttggcaatgtggctagatttagaagcacccagaagagtgttgaagcacatttcatggtacacttatacacttatacaatgtttgtggagagttaacttaggaagaagtgccaccctgaaccctatatcctcttccctatccatcatgggatgaactgtatcatatgttgcttctaccgttacaatctgccataaatcccgtgggaccaaactactacagccagagtcctctaaaaccagacattttggtatcagctatacataagtaaccgtcatagcattccaggaaaatggtatcactcagaccaatctgctcagatgacagattgcttggggaattactttctgcaattcctactctccacagagccctggatattgtcctagttacacggtacttcacgtctaagtagctagtgccatcatgagtgggagtaagtaaaaaggtttctcagctgggtcatttatcaccttgagagatgcttcctagtacacggggctattggatgatgagtgctttcagaacacctccaaagaggagctgaagccaccttataggcatggtctatactcagcacacaatccctactccaccccaaccctgccatgatggcagctccctcccaggaacgtccctcagtgccctgaagaatgtctagtttgcagcataccttcctcagaacaccaggctgacaattatgtttgaaagcctctttccagtgatttggagttgacaggcaaggctaaaattccaactcaagaggatcctaggaaatactaggacaaggcagggcagtcaagatcaccctgtgaccactggggaataaactccccttcttctgcatagagcatgttccaagcaagtaaatgactgaattggtccaggctctctgctggttaatctcatggtgggaaaatctggagtttattttccctcatgtgttggtcatgcttatagatatgagcacacacttgcccttgcctgcagctaatccacagttgagtatcattatgccagggttgatccagtataaggatgcccaccatatactgaaaaagcacatttacagttgtcaggccagaagcgcatgtcagaaataaaattttccggtccatgttgtttccatcccaagccatcccaaagtatgtctaaccctggagtgacttcctaggtcagggctaagtgacagcaggatgatggtgcacctctccagtgctgggaacatggtggagctgactatgatgctgagccttctcaaccttctcaaagaaacaaacctggcagcagccttttaaacgtagctacctggagtcacgggtgagctgaaggttgtattgctctatggatgtttgaatatcagtccgcacaaggaagcaggtgagaccatctcgtgcctgctcgggaggacctgactggcagagaggaagaggtttgtacaaaatttactgcaattaacttggcatgcgcctagaaagagaaatggaaaggcagaaaattgctcggtgcccaaagtcaaagccacacccatgttctgccatgtgtgtgcacgtgacagtttgcagtgatgactgggtgtgtcttgtaaagacaacagtgtttgtctcactgcgtgcccacccccctcgcccccccacccccaccccccgccgccgccgccctctgtcaaacaagaagaaatttgttccccagaggttcccctgccctgggttgcaatgtcctgcgtaacactacgctgttagccgtctcgctcagtctgtatttgaaaccaactgggaggcattgctaggattcatagccttcttccttcagcaccaggttaacacccaactcaacacgcccttttgcattcagtccaacaatggctgggtcctcttggctatctcggggtctcctggcaatcagttcttgcaaaacactccagcaacttgtacattactagaaatgttctgtggcgctaacggtcacctgggagatgtgtgacgaggttttacagaattaagtatgagggactttactatcacggtggccttcaagcttatgtccttgagggccttgttgcagtacttccgagacagtgtccctcagtccatcctttattcttttctcctctcctcagataaggatggagcagggggcaatgttttactccccagttcttcttctgttttgctcccattaaggggaaggctcccgagagtgatctctgttcttagccgggttaagaacaggagtccctgagtagaaggaactctggtattccttaccattcaatgcatctctgatctcacaagaaacgtgggaagaaacaagatgctgtatgcacaccaatgaagaatgcaaagggctgcctggaaagacttcaagactagagcaattgaaggccaaacgctcttgctgtgcacctaaactgggtgaagatccatccctgttatgggtgttagagtcattgatttgagactcagaagtcaggccaggaaagctgtaatgcctggccttacgttgggagtgttcactaaaaaagtaagttggtttggcccagctattaccttagtcaacagctataaatgcacacgaattctgctatgattgatcctatattctgatctctgagatgtgtgtcagtggtgacagaatgtgaaggtcttagggaaaatgctttatgaagcaagcattgtagatatctgatatttatctactccctgccaggaaagttcaagggctccccagggatattctcagtgggaagattcgtctatgaaccctcaatacagcttggtcacgccatcacccccagcctttattgaatgacagttcttccttcttttgactgtgagtacctcatgttggcctggggcgcaataagaaggttccctgaaaagcacctccctatggaaatttcctccccgaagaggcttgggttttctgggctccttgttgacagatattgtgtaataggaacttgtggatccagacagtggtacagagttccatgtaataagaaagggtccccacatgaccatgctgttacatttttgctgggagatctgttttcctgtgacacacgcatatgcaggccagaggacaacctcacatgttcttttagtgttgtccaaatattttgtgacagggtcgttcaatggcctaggactcaccaagaacattaggctggccagccagccccgtgtctatctctccagtgctacaagcccatgccatcatgcctgactttcacacgtgggctttgggaactgagctcagttgcctatgtctgcaagaaaatatgtcagcacatgactggactctccggtgtaagtcctgcgatagagtcctgcagagacccaatcttttcactcctgatttctctgaaaactggagctgcctcctctgctagggagcctgcctgctcattttcttctcttgctgccctggggatggaactggcccagagcctgtgcccttgaaggtgtggatgaaggctcctgtccaaaactagacagtggaaagatctcagactgtgttgtttacagagcgtgagctgtttttgaaagattctccatgacccatgctggaaaggaaatctcaacatagcactgtgaatgaagtacctgggctttcccagtgccaggcggttctgggtccccactgcctcttgcagatgcccagctaggcagaaagggctccaaaaactagaaggctgcacacaattcgctgagaacctttgccactcttgttgcctttgtagctgggcacatgtagaagctggcaaggctgaagcatccataaagaaccagaccccgcccaggcactgactttgactgtgaatataattctgacatctatagagcctgagtcagtctaggattgatgccttaggccacagataaattttcatgctgcgttaatttgtctctgaggattcaaacttagttactcagaagggaaacactaattcttaatatgtttttacccacaagctgagatatagtaagctcagactccctgaattaaaacaactatttttaatttttgtttttaatcagagagaaaaggatgttggagaactggcttatttctctttcatgtaaataaatttcagacggaagaaattgtctttaagggacagctaaacacaacaactctcctctctgagaactggagacttgtctacacagaaggtcccaactcagagagtccccagaggtcaccccaagctggagccagaacccactccacacggaaatcacagatacactcagtgaccctgagggtgagaatgggacttgcagcttttcccaccgagaccagcaagcataagtgagcttccactacaagtgggagctgcttgctaccttttggtgttagtacagttcaattcaggtgggaaaacactgagggcaagttaatgctaatttgcataattacatttaaaaaattccagctcctgggagcctctggtcatctagcatcttgcataaggataactttctaaagactaacttctgtagatctagcccaggaataggtccaaatgggttgtctcttcagtctcttctttcctcccactccctcttcccctttgctacaactaccttctcccctccactctccctccctcctccctttcctcactccctctttccttccttctttattctcaaatcactttactttttgaaaatatggctccactaatgtctgctgagtgaaacaaagctatgttctttttttctgggtgaggaagaccatcaatccaagatgatgtgctttgactttcattctttatacatgagagatgtgtgtgtgtgtgtgtgtgtgtgtgtgtgtgtgtgtgtgtgtgtgtgtgtgtgtgtgttttacgacaaagaagccgtgaaggggatacatcagtcttacagaaacaagcctttagtcacttttcccagtgacctcacaacaggcaatacagaagattgtgcacagaacatatggggagaaaatggcattagtcaggctcaaggtcaaaaactgggagcacatggtgccactgaggatcctgttgctctaaaaggtatcagcaaagaaaagaccttcttggtgtaacccatctccctgacaatctacagcgagaagtgggtggattctacacaaagaaggatcaaaacctgatgtgagaaatactcctttcataaggacagggccatacagctgaatataggagctgagagaaggaagagaagaccccaaatctaaagggcaaaaaactagcacaaaatgcagactctagaaagagccatccatggctctgtgctaaactcctgttgctaccacacaagaaacctcgggcataaacctcttccaataagttacacagcctgtcagctgtgccataatatttttagaggaccaggggagacttcacctcttccagcttttaatgactctgccatctatttgtgtgtgtcccttcaatcccagtttcatccttatgtgaacttctattcctcatctgtgccaaaaaaaaaaaaaaaaaaactatgcattttgcttataggggtcattattatcagccacactaaataccttgacaactgaagagaggatgatctcacttcagagtcttaagttacatctacaaagaccctctttcccaaattgggtcagaattcattgaatgtaaaggttggattgtagatgtggatttttgatgacaccttcctgcctcctcagtaacccactgggacaacgggagtcaggggtgaggaatcccagatgaaaagtcactgggtgttagaagaaaggcagctactgaggtgatgtgtggaggggcacatagaaacgaagcgaaaggagtcgtgggagcccccatggcagcccagtggtgaatactgcttcatctgcagcctggatcttgaatgtggccattcctaaatcccaacggagcttacagacttcctgtcccactgaagtcaggccctggaattagaactcaaggttgtttgctaagaaacaggcagattcgggcttaaacaaaactacacaagtggtaatagctggccctggtgggcagccctgagcctattcaagagcttagggtttgttttggacccatatgaacaggggttgccctggcaagagaaaggagggcttgcagtaggacagtgatccataaaatacattggattagctctgacagttaagataaaacaaacaaacaaacaaacaaacaaacaaacaaagaggcagaagttcctcccctaaccctctgcattttgtactccatatgctctcaggatgtgagcacttctattcttttgccatttccagaaggctgctgtctatcagcttttccaagaggacacattgctgggtgttgtaatcctagcatttgggaggtggaggcaggagggtcacaagttcaaggcgagtctcagcaacataatgagttggaagccagacatttatttaaaccctggctttaaataggtaagtaagtaagtaagtaagtaagtaagtaagtaagtaagtaagtaagtaagtaaataagtaagtaaataaataaataatgctttatcaaaaaatttaaagactgttgttgtcgttgttgttgttgtttacaaagatgatatgtttcttgacagccccggaagatgcctgtgcatggaatctgccactacctggatgtccagcctaggccctcattgctagtggtctggctcgttcgtcatgcctgacacttctactatgctattcttagcccagtactccatgatttgaccaagatggtccgggccacagccaggatgtgccagatctggtttgagctgtctcctgctggctttcagcctaaagttaatagagcaagcaaaatacatttgtagaataggaaccatggccccatttcttcacataaactcaacgaaatccagttgtttcaggatagtagcctgatgaaaatgcacatcagcaaactgccctccctcagggttgcatgtttgtttgtttgtgtgtgtgttggcttgatagccatgccctactgtctccacccactgtatgtcactatagcagaatattacagatctggagacttataaagcaatctattcatcactcttccagaggccagcaagtttgggatgtgttatcagtatctggcagaggcctttgagccgtgtcaaaagcaggccagcatcatattgtgaggatgcctgtgtgcatgcaaaaaagagcaagaagagcagagccagggagctgagggaactgggctcacattcacaacaaaaccaggcttaagacaagtaacccacttccaataaggcaacatgagtctgttctgaggcagagccctcataacctcaatgcattttaatactgctacaatgtcaattaaatttcaacctgagactggcagaggacgttcaaacccttacctgctttcttgccaaatagagacatagtaacattcagagcctgtgaagtatctcagacacccagcttcacaattgatggagaaaagccaaggggtcctcacttaggtgttaagtggccatctttactgttcttccagggctgcaggcagggctgaagactgcacttggctagaacacttgcctatgaatgttgtgtggcaaagactgctattgtctgcataggtgagcaggctgtcaacaaaacctttctagcttcttccgtaaataaactacaaaatgtcacttgagggtgtcacagtggtgctaggaatgtgtggagcagaatgtagccagatatcccagagagcccagtagccacataaccatctccctgcaggcttccttaaacccaacctcatcacctctgcctctgtccgcaacaccacttgctgccatccaacaatggcttaaaggttagggtcatttaatgcccaggctaaagtcaatctgaaagctattagccttcccaagtactggaaatcactgttattgtctacttcaatgctgcctctgaaagatttatcaaacaagtgcaaatgttagaatgctatctaattattatggcttaattaattagatagcttaattttttagtgcagggaaacgatttagcttgttaaactttgataaggtatccaggggaggcaggaaaggggtgcttaactagagaaagcatcatgctctaaatggtgtggcacactggtgggggtgacgggcgtctgagaatatggtaagggcgagttacttaacctcttagcttcaattgcctcatctacgaatgaggatattaacgacaccattacacaagactatctctgcaatgtgtttggcattatgcctggcttaaaaggagccgaaaagagcgttagccaagatagtgctgaagtctcattggtaagaataacagtggtgatctttatcagcagtagtaagaacagtgatacaatgtataaaagctgggttaagtggaccccaaacagccagttaatgaaagggtagagaattgaagaagaattccctagagtagagtcaggggaggccgtatgaactgtcgtggtgaaaatgtgacgtagttcccataggatcacttgtttcaatggattcccccattggctgtcaccatttattaaggatctcagtgttttggggatccttagtaaatggtgccttgttgggagaagtgagttgttgggggcggggcttgaagctccatagttgggccctacctcatgtacattctccgctccagtgtgccagagcagtgtgacaaatatctaatactcttaatactgtgccttccttattgtgatgcccgtattccatcccacgagccagagtaatcccttcctttttcccttaagttccttttgttagttactttgtcgtcactgtaataaaaaagtaaactaatacattagtcttcatctatgttataatgttgcctgggatttccccccacatgggaaacatcctaggaaaagggtttcagaatcaaatactcgtggcttcaaccctggctgtaacctcaaggaagtttctaggcatcttggagttgcagtgcccttatgggaaatggggatggtcacacctgggtgaaagattatacacatatgcagtaaagaaaatgcacctaggacccagcaagtcctggtgggtggtctttcccttttgtactatgtttggcagacagcaagatggagcatccatctggataggtgagaaacatcagaacaaacactgtaggctcattcattgctcagtggaaagcaaggcgctaattctttacttcccctcctcccaccggggtgtttgaaggaggtacagtagggctgtcagaaggttggccggcctacatttcattatatttcatggtagttttgggttcgctggagtgcaggacaatcagagggaggggatgcagcaggagcaggtatcctgtcaataacaatgaaatctcaggcaccacttcctcccctccccacccaaatattaagggctgttttaaagctatgtataagagccacagatagacctctccccattgccactctgagatgcttatcgtttgctttgaatggcacagatgatatgggcaaccaacagtctgaacaagcttcggagcccttctccactgtgaatgctgcttgccttgatggatggaaaagtaatttcactgaaaaaagatcttacacatcatctcatttcgactctcagtaacattgtttcaatgcatacgttatttcccctttcctaaattcaaataacatgcttcctcacacacactacccatgcccgttccgagattttgttttctttgggtttgttgaagtaaagctgatatgaattttgacattttaagtacactttcaaaacactctcctgtgatttttataactgttcctgacactcgtgtgcagtcatatgtcattagttacctaaatgttttctataattatgtagattatgttgacactttctgataggatgcttgtaatttactattttgtcatttgtgccgttctgaaatccatcagataaccattttcaatcgtttccagatcaagcagctgttaaaggctcctgctgtgctgtggctttgctgctgcatccactgtgggctcagaaaacttctaaatacgtgaattctttctccactctcaagtggacttttccttccttccttccttccttccttccttccttccttcctttctcttttcttttttcctgtttttttttttagctctagtaatgaccaaataatgtcactgtaacattcacagtcaaatagaaatactactatacacaagtcttcatattattgtacagaacatggaagctgtgttataataaaggcccaaataattgtggtgaaatggagcctgcgagctgcccggatgagcctaggagagttccacaggtaaaggttctctaatccgagcctgctttaggtaggagtaaatgagcactgggaagaacaatttcccaggcagatgcctgtatagagctgtggtaaaaatgatggagagttaaggattcctagggtgcaggatgaaagcattggccagagacgttggagagtttatggccgttaataaagggcagagcagccatattgggggatcaatcagctgtgtttactagatgtaaaattacttattattaaatgtaagattgtgttattacttatatgtaaaattactgatgtaatctaatttctttgaaaacaacagtatgacagattcacattttatctgctataagtagcccaggatggccattagggaagggaaacacgccccatcccatcttagctatttttagttcaaatagaaacacattacaagttgtttctgagtgaaatgaaggtatgagagagatacatgtagtgttaggagtgcttttcagagacagatgaagaaaacaataagacaaatagagtaggttatcatcatgtgtcgcctgcgacccaccataccattgccatggtgatggatagaggcatgaacttgtcacatatgcacaattcatgcctgggaatttgattcacgacacctattagaaatcggtgagaggtgacatgttcccatgattcagccacattttgatgcaccagatgagtaccatctctctgacaagtctgtgcttggcagcagagccctgcaagattctggtacagccatgagtttttgtgggtgtggtctacctaatccatattaagtccaagtgaaggcagtggtaaagcttggtagcatgaagggaggaacgatgttaattccaaatctagttagttacgaagtgacaaaggatgctgatgatggaaccaaaagccagaggaaggcctaaaaatgaatcaagtactaaatggatgaacacataaataaatgtataataaattatgagttagaggaataagtgatgctttaggaagggagtaggccatacaaagaaagacatttctcattttaaataaaaataaagccaaataatttaacaatttgaatcagataaactaaaaccatgtaatatatcacatataagccatgaacatagtgtattcgtgtgtctctctttcacacacatgcatatatgcacatgtgctcacatatagaaatgtatatgtacacacacacacacacacacacacacacacacacacacaagccaccataaaattcccttgaggaacagttttactttctcatacacttctgagaattctcagtgaatgagagttgtggatggagaaatcagcccctgaatcaagacagcatctcaccatgatccccacccatgtgagaaagcattacccattggtctgaaaacacatccactcttataacttcatcctggaagtggaaatggaaagtcacactttctaaatattaaagagccaaaaatggaaattgtgcagtaaatataacaatgcaaagtgctttggccccgagctttcccagacactataaaacccagcccttctagtctctgggcaccaaggttgtagcatttccagggaacaaatcgcccctagaaactggtgtgcttcaggctgacctacatggtcctatacgtttagagcagcttttgtacccctcagccaggaaagatggaaaccagtgtgtacctcccttcctctctccaataccaggtgggtagggaggacaacaattggtatgggggcaactcactcatcagtgccacacaggggacagtcatgcattaaatagcacttctcgtcaagatacaatgtgaacaaccccctggttcagtcctgggaacacacgagtgtgcggagtaacaaagagagagcccacagccaaaccccaccgggaagaaaacgagctgtaaagctctagcatccccagtgtggtacacaggggcagccctctaataacacagcacataggcatccctgagctgagagaccacccaactgcatccaacaagagctgctatgtactcagagaacctgctagtgtaccaagcccctcatttgcagcccagggcgcccttgtgacaaccttttaggaatccgaaggcaagtgtgatggagtattaatttggtaggcaatccggcttctgtgcccatggcccaatcgaaggaaacacaaaaaaagagctgttgactctaaacatttagaaaattaccagctacatgagaacttctgagtatggctcaggacggcataaaaaaagatggaaggttttaagtgggtctcttaccttcttgtcactcaggccggaaacctggtccacatactcctcttggatcatgaaggcggctaagttggcagtgtagctggccaggaaaatgacagcaaagaaggcccacactgacaccatgatcttggaggtggtcccctttgggttctgcacaggtacggagttgttaaacaccagaccccagagtaaccaaatcgctttgccgatggtgaaagatgggccgcctggctctggtgtgatacaaaagacagggagagaaggttaagcttgaatcaatggatctgctttgatctacaagttcccagagccgaaaaggtcctagcaagagtaggaaacctctccactgagccattcaaatgacagcttcacaagtcaagatcctgtgtctcctctgggagctaaggaaggcagaagagggtttcttagaggtaactccagagccctggtgtgtggtgaggtcttttgccaactaatcttttcctgttttcgtatatgagaccatctagatcacataaagttgggtaacaatggtcaactatcctactgtggtcatattgacctttattcttaaaatgtaccattgtatctaccaaggaaatactttaacttccaagatatcagcaagaataatgtgaggctcctttctaccactgccataagcctccatatgtcaatattggatgattgaaggttcttttggctaaattttatttatcttccagcccctagcagccgatgtctttaaaatgacctggatttccctagcccctccaatgtcaatccttcccaaatggcctgctgcagcactggcctctgtacaaggaagctcagagaagagaccgtagactgttggcctgaccatgtccatccagaacaaaaatgtagctcttcttgatagacgttcctccgattaatcttagggcttctgcctatacatgattggtaacttgtctgatgtccctgattgtggagggagtgacctcatgcactatttggatctttgtgcacactgccactggagaaacgaatatctgcccacagagttttccaacatattaacaaaggtcttggaatcctgggatcctgacaacctgtgctcggccaaccacaacatcagtggctgtacacgctgaacttactgtgctgtgcacaaacacccgtgcgtgtggacctgatttcatacaacagatggataagtaggacgttgtttacgaagcaaagttttgcacactgagatgctctaaggggtcttgacatttagagtggaacagtgttgaattcctctgtaagagaagctttgtaaggtaacaggagtgatcataaactcctgtaccgtatttgtaaatctgaatttctgttctggtttcctatttttctcagggtagagagcagtctgcactatcttcagctgttaaccatgttgacttttgtctacaggagcctcagatggttcatttccaagtaccctttaggttggaagataaatccctgcttcaggctagcctttagcataggtcaatggcttgttgtggagacatgtaaaactccaccttagaaaacacactaaaatataaggtagggcagcacttggaagtccactgatgaagcaatagcgtggcaaccaccctagataaagagatacaccgtgaatctggtcattctaataagaccaaggtaaataaccagtattttgaaacacacagtgtctaagttgcatcccaggtttagtaaatcagtattctaggtccaaagacccatatacaattcttattagtatctaagcttaagaatctgtcctcctggaggtacattctagaataactagaattacagaagaagaagattgaaaattggcatatttcttaatcctgggacttttatgaagttctggaggaacttcatatttactaggctctcatgactcctttaaaagtctggtgaacttttcaaaaatattaaaagtgcttcaagcacgaggctagtgtgtcgatgctgatgcctacctgcccagtgaatgagaccaccctatagtagctacaagtgagaactggtttcctgtgcccgttttatttcagacatgaaatttttatactccttaggaggggaaggaggttaggccaaagacacatgctgtggagaccctgaaactcagtagtaaatcttcaactgtgggaaactctaatgactcagataatcttcatataccctcaggtattctaaattttcttattcttactgtgtgtgtacagcctgtctttttccttacattctctccccaaaattgcctgtaaattatggtttaaaaactagtgcccagacatgtgctagccatctctgttatcaatctttctccttaatgatccagtaccaggcttggatctaatatgcaccaaaaaaagaacaaggagaacctagcacacattttaactgcacatttctataacattgctatgctgacaaccagagatgctaatgacttccatcctcacagaaagtagggaggatatatgtaacaaacagtggatataatggttctgagttgtgcagtcaggtggaagggtggagatgcaggagttccatgtagccttacctctgccatcagctaggcaccggttgtaacccacagggctgaagtattcaaagacaaagacagctacagcagagacaatgagcagcatcacaaacatcatcacccacacgtcagcactgaatggctctgggaaggaaagcaaaagagtgctcagggtcaaaacagagaacaaacaactcatcatttccataatcatctgctcctgcaaacacctattttaagatgagcaagccacaagtgtgtcctgtgcccttggagagccagggttgagtcaggaacacataagatacacccaagcagcccagtctccacttgggcgtagaaagaccattttatttcaaatgcataaagaccccatcatgcttctgagccctgctaggcttataggggcaactctgttactctcagaaccatgcctgggtctttcgatgagattgcaaagagtagatattctacaaggaaatgatattaaaccgacttgcttcatgtcctcatcaacatagctataccatggggggaggaaccctcaaaagtcttccacagtgcttgtgagtcttgtgaacaaattcttggaggcactatttttgagttgaatcagttgagcaacactgtcatacactgactaaccattcccatttgcttttgtgtccacacccttttcttagggtacagcgtgcatttactttttcagcttactttgttataggatatcatcctagatatcattgcggtatgagaacacaagtcaatcagtttttgtttgtttgtttgtttgtttaaagctatcaggcagaggtagtgtacatctttaatcccagcacttgggggacagtggccggcagatctctgagatcaacctggtctactgagccagttctaggacagtgaaggctaggcaaagaaaccccgtctcaagaaaccaaaagccaatacaagacaagtaaaacaaaacctatctacagtgactatcagtgtctgcagtagtggagattttgcagggaataagagaataggcatcgtttttgaatcacaaagcagctacaatttgtctcttcttactaaccactgtggttaacgggctaatgctagactagagaacaagaatgctctgtgaatgttttcttcagcatctttcattgttaaacctattttagctgagttagatctctctggcttagatgcactcatattccaaaagccatctctatgactccctagatacaaaagaatgatcttagttctgtcccatgatacagtgcccctcaattgagtcctaaaaataattctggcctttttagctgtcatttcacattgtaaactcataaatgggtgaattaacatgctgtttccccttcttacaagtcattaataaagatgaagttgagagagggggaattggtgaaaattagaaaatatatttcccactctgaaatctactttattattgaacttccaaaaggactattaaagcccaggtcacttaatcaattaaaaaatacccttaacaaagtcccagagtttactataccaaccattaaacacaaagcatttcagaggcagcggtacaaacctacgtggtacatctggttcatctggtgtggggaaacctcctccactcttaagtctaatttatgaaaatcctaccctggttccatgtttttatggttgactgagtattggatgaaagctttgtatttgtaatctccccccacccccacccccacccccacatcatctagtttagggcaactttctgcaaacaaatgtaccaaacattattattgatctttacaatttataaaggacttctccacacaccattttttctaatccttccaatgggcctttcattatgagatggctgtatttattctgcagaggagaaaattaagtacaagaggtcaagtttctttcatacacagaaagtggcagtcagcttatgaactgagggtgtcttgaaaccttgcctagcatttcccacaatattgtgtggcttagttctctctgtccatcacaatggctcccagttgtggtgtggactagaacacaggctatgatggctaccgtgcctgagctttattacagaactcctggaaaatgcttaacttaaccaagattccaaggcctaacagtgaatctagtaacaactccaataatttcataaagcaatgcatgcatccatggcaggtagtcagcacatctgacatctgttactattataatacatgagcctctcctctaccagacactcacaggaggaagataatctgcttaacatccccacaatcccaggtctactagctgtactgagagaactgaaattagaacctactttatgtcttacaatgtttcagtctgccttataaagtaaacttgcaaataagttatacccagaagctacaaaaatgaacacttcaatgtgtaccatctagtaacatttcatgtaaattagaaggatcagaattcggtacatcatgagtaagaagactggctaagaaacttaaaaaacttagggaaacatttcatataagtttcataagtatctataattccacttagtggtacattaagtgaattaattcctaaagtccagatttgaaaataaatgcttgttgttgtctcttctaatatttccattaaaaaaaaaagtccatccccttcttcccctcagagtgattatgacagtctaaagacttatagcttgtttatgaccagatcaggcttcctgtctcctagcccagtgttctggtttcaaggtgacagtttattctccaacccctagctccatatcccctgcaaaaaaaagcacaagaaatgggtatgagctcactaaagacctcatctaattgaagtcgtggcctcatctcacccagtcttaaatcatatctaatgctttttacatttgggtgatgctagaaagtagggaaatcaagaatggtattgggggaaggcagtgagaagcgggggggggggggtacgaggaagtgtcagatgagatctggccagcaaaatctcagaaaactcacatggaaacagaaaatgtggataaatttatgtgtgtgttagtcctaagttcaattctcagagacaatgaaaaagtaaatagatctcttgatgatgtggtagtttaaatgagtatggtcaccagagattcatgtatttgcttgcttagtgcccagtcaataaactgcttgaaaggattaggaggtgtggctttgttggaggaggcgtggccttgttggaggaagtgtgtcactagaggcggactttgaggttccaaaagcctacaccaagcccagtggctgtctctgtctctgcctgctgcctacggatcagcatgtaaagctctcagctactcctctagcatcatgcctgcctgttttctgccatgatgataatatgtcaactccttgaattgcaagtgagtcctcaattaaagacttcttttatatgagttgcctccatcatcgtgtctctatagagtaataacatagtaactaaaagagaagatatttaaatttagaagttgttgcagcagaaaaaagactcagaggtcaactaactgagaaccatattctgtcatatactgttggtgagaaaaaggaagtccctggatggagtaaatttgttcaaggtcaaatgaacactgaggatgaagaggagactaagtggcttctgatgaccattcaggcagtatttgcttatatgacatcatacctcaatgattcctgggtgctcttaatgtttttgtgtgttgaagaataaccaagtactccccaagtggattaaatgtccaacaagcacttcctgcaattgtttctcatcctgtctacttgttcttgagtccatttcctatcaccagcaaacacatgatttacctaagaaggcagaaggtgacacagtcccattgctgcgtgataccatgacactgatgccagtctctatgaagggcacagagaagtcaaccacctctgaccgttcttcattgatagttagtgatcccactgccatataggccctcttcatgaccacctgaagagaaagacacaatgatccaatcaaaacattctggaagacaggtccatcacaggcaaaattctcatggcccagccgtaacttgggcaccatgaatacccttcacctcctcttggctctgttgttggcctgattttcagcaatttggccagcagaccccagcgggccctctgggcacttggattataagcactcatcactgtgcttgaatttttatttgtgttctggggctcaaactcaggtcctcatgactatgaggcagcacattactggctgagttatctctccatctctagttactattctacagtttgttaaattcataagacaattctttagcaatatttaagcaaaacttaagtgcacagcagaagtgacattgtcgtgaccttgcctcctgacacttacctcaccaatcatgccgttccaggtcccgttgattttctttccatgcttgccattggtcaccaggtaaaggtcataggtgaacttcacagacttagaaattttcttaaggatatcaatacaaaaccccttgcagcattttttgatgtagcctggttcctcatctgttttattcctacccagttaaagaaaaaaaacaaacaaacaaagcaagactttgtacaagaaggaaaatgtactttttcattaaatctccaacaccaaccctcatccccacagtagaatttattcctaaaggaaataaggaggaaagagaacaagcctagaactgtggtatttttaactatctcggtatcctgaaccatatcacagcttacttcaatgttcctttggagtataacgtagatagggaaaaggcatgtatcctacatgcttagttcaataactttttccattgagttcatagttttaatcaaaacctgaattgagatgcaaaatgtctaccagaccctgcagtctccctttgagatgtttttccttcccctcctccacaaagagtcgtattatcccatttttacagcataaatcaagtggaattatttccaaatatgggtctaattctcaaaatactagcttagaggaaacccatttccatgcccaaagaaagttaaagctcagtaaacttcaggtcccaatcattgaggctgggcacgttcaaaggaaacttagcatagcagtcattccctccagtcaggggtatagatggagccacacatttgatcagaacgcccattgatcctatagcccaatagcagctaagaatttcagagggtgcctagctccaggtcaacaaacagcacatctgactctcctgggccacctagacccatccatctggggaggtgtcatactcagagatgatgcgcttctggcacgggactgtattccgcatgcaggtcccactgagagggtccacactttccacaatgacaaacggtgcctcctccaaggtaacgatgctcagatggtcatcttcctgttcttcagtctcaggacacattcgaggccacacatagtatttcatctgcagggacttgtctttccattttcccacctgcacagagagaacgaagaactcagcagccataagccgtagatagttctctagcctctcctggtcctctctgaattgtcttagaagctgttaagcaagggcaaaacaattccagcacagaccacgatggaaagaatagtttctagaacatatgctgaaaataaaaagactttatctaacacaacggttctcaactttcctaacgccacaacactttaattcggttcttcatgttgtggtgaccacaaaattattttcattgttattccatagtgataattttgctactgttatgcattggaacacaaatatctgttttctgattgtctcagggagacccctgtgaaagggtagttcaatccccaaagggtaaagacccacagattcaggacggctgctctaagagaggtaattctttcaattacctaccctttcatgtactcagcattgaatgaggacctgttgtggccagagcatcctcctaacctcattgctcccacactaagagatgtgtaattcttgactttcctggaccacataactgtggggtttgtttgttttacttaactataacaagaaatataatcccaagatcacaaagaattattaggaaagataaaagaatgcctatggcaaatgagcaagctggaagtcctctgagctgtaatggaagttctcgggggaatttttcagggaactaggaatctctgattggaaacaaggtaacatttatatgaatggatacagacactacttgcttggagaagggagtgtggtcggttgggctagtgacaatgtgtgcatgtgttaacgcagagttagttgcacctactggactaagaagacatgtaggtatgaaagggataggtgtctctgtgagaaggcacttggggccacagccactataccactcatcactaggaaacaccatcactgtgactctagtgcgaaaggtgcgcactctctgaatcacctacagcagacctgctgtcagtatacaaaccgggagaaatgtatgggttcagatgccttgtggcagaggccttcatccccgattttatgtagaaactacgcagttttgttgctaggttcttactgtactaaagaacctacagaggaaagaaatcattttacttttcaataactgagcatcttcagttgtctccaggagataaggcatgatccaagtctacttctttccacagttagggtgatgctggggagggaccaggtctatgaaacaatttggtttgtgtaactccaggaataaatgagattaacttcactttcaagctgacagacacggattgctatactaaggcctactcaagctccctctcatccgagtgtttgcttttgtctgcatttaagcgtggttagttcctccctctagcttgtcccacaaagctgatcactttactcccatggccaaattaggccccccctagccaccgcctgttcattacatcttcataacatgggcattgattttgtgtcctagactattttgtttggcacttgctcagtttttctctggcattaactctggggccagctgatttgtttttatcctttaagctagtttgcttctaggctcagaaggaagtgttgaaaccagtattttctttcctttctatgtatagatgcgccatgacctctgatgggattatgacctaataatccatcataaattgaaaatgttagattaaaatgtattgcacactcttgacctatggaacacagtattatatagagcattggttgtttgcctgtgtgatcttgtagctcttgtggctcatgagagatgtggttcactgctactgcctagcagcatgagaggatattctaccacatatcagcagtccccaaatcaaaatacgcacagacacacacacacacacacacacacacacacacacacacacacacacacacacacacacacccctatagtggagactgtttgctcgtcaataaattattgatcttgaataaactattgatcttgattttgtcgcaaatctgttcatctcatattgctaaggctaagctagcttcaaatgacttcccagaaatgtggaaatatttaagccctcagacagagctttggcaagagaagacacagccattgaatcagatactttcccaagcaagcatatttattccaggagccaaagcaatattttattattctatgcatgcttgtctataagaaaaaggttgaaaggccttaaagtgcctataaatttatttatttatttatttatttatttatttatttatttacaaatcccatcatcttcccccaataagttcttctggcctctttttcttttaactgcaattgtattcttctgtctttattgcaattagcctatactagagaagcctagcagatcctgtgactcccgcaggacatctgggctcacatgatattccccaagagttctgttgtacatactgcttccacgtggctttcttattgaatgctatggatttgattagttatagaatgctttcaacgcaaacatgaagatctgtgttcagatatccagcacgcatctgtaatcccacctctggggaagcagaaacaggtggattccccagagctcactggccagtcagtctagcatgacttgagagctttagatacagtgaaaaatcctgcctcaagtaaggtggagagcaaataagaaaagtattcactatcaatttatgtccttcatacacatacatgcacatgtgcacacactgacataaccacacatatcactcacacacacacacacctcaagactttgccatacaatgtccattcaaggattcaacaacttctccctctccttagcactgtgctcaaatgtcttgctgatatgttcaaggcctgtgtgtgactctagtctacctcaatggaattaacttcagtgccatggatcatgagactcagaaaagaaagtcatttgatttaagggtgcccaactcaggtcagccaggaacagattgtaagaaaacatcgtcattttctttgctaacagacttaatgtatctgggagggtcgatgctgcggagagagctctttggcaaagtttcccctgacattcttgtgaacaagatgaactacaacatggattactgcatactttgacagatcgagaaggggttttaaaaatctatatccgaaaagaagagaaaggattgtttaatgaatcagtgtcagcgcagagaggggtctttagtgacatgtcaggagactctgttcttagaagtggcctatatagtgttttaaagacaaaactgaaattgtgttcaagaaattgcagacaataacaacccagtgaggacagataacgtcacataaattgctgaatggagtctgaagtgatgcaaattaattgggatggtggatggaaccgaatggaatgaaatacaatggtatttattctcaaactctagcattctttttttttcccccaaaagcaactgttctgaaaaggaatatttcaatcaatggcaatccataaaatctattgtaataacagatgatgtatttatagatgtacagtgtctagcacatggtgtgaagggagggcacagattatcactccctgctctgtgttcacaatgccccagcaggaaaactcagttctgatcctataattctatgatctcctgacttttattaaatatgccattctcatttccctaacaataaggtgttcccagagttctcacacaccctttcccagactaaccggatcatacctatgttgtgtgtcaattcaattcaacaaaaattacacaccagtgtgtggcaggcgctgggtttaatattggtagacaataggaccgcatggtgtttatcgggggtggaaatgtgtcaggctctgaacttgtctaataatctcatttgtcatcacagctaacctgtgggattcactccccattgatagctccctctgcaaaaggagttgctgacttctaagatatcaagaaggataagtgggtgccgcatgtaccattagtcaagcaggctgactcactgagcacccgctgtaaatgttctcccaactcaacactgaaatagtaagacaaaggcacaccctccaaggacagtccagagcaggccaacctggtggacagcctcacgtaaggccttggccattgctaccatgggggggattaacaaatactttggcattcagagtagaagtgatcattttgggaaaagtcacagagaagctttacagagacctcccctccctttttaaagctgaaccttaaaaaagaaattgtagcccctgaagtggagagttctccatcccctggagtagcagtattctcttctttctaaggtcctaatgatcactgctgtccaaactccatcactctcaagaggcacctcaactgcactcatctctttccacgtggaaattgctcggtggcattggtggctcggactgagcacagacaccatgaaattgttaaatcctacagatcagcactgccttggctcaccctgccctgttgttggcattggccagctctcctctatgcagaataaccaagccactctactctgtgctatttccttccttcttaaatggcgtcaattcctttttttttttttgaagcattgtcagtgtcttgtcctcttaagctaagttctaagtgggtccctaaaggattccagtgagcatgagcaaatttctaaaactctcagggctttgctttgcatattcagaaaacaggagacttgatttctgagtctcatacatagttttatgatcccatgacccactctggatgggggatttcatagtattgcctgcagagaatggccaaggaggaaacttcctattgcccagcttctccaacaagggcaatagctgaggttttggtacaacacactcttctgtcttaaccacatttaaatttcactgtgtttcccaaaggtccaaattgatggaggactgaaagaagaaacctttgtagacaattcaatacatagcaactcaggtcggagggtgtactcagataaataccttaaatttgatgttttctgtgctgggaagcaaactcagggctatgcccattttcagtaatttgctctactaatgtgccataccttcaaccccacctcatattctttatagagcaaggcaggttattttaaatgataagcactcaaaattaaaaatcaaggaatggatttaagtagaaaacctggcgaacgtttcaagtatttgtttccacagcaggagagacttgtggaaacactccaaatgggactgactggttgaaagcgaagtgaagggagtaaccaggcacgcttgcctccagagaacggaagccttgtctgggagcctggaaagacgggagtgtgtaaacctgatgatgtggataagaaaggaggtgaactggaactatctcagagaaaacccgaagcagaaaactgaacaaagtgttcatagtcaggattaaaatatgaccaggaaaaataaaatcttgaaaagcacctatgagaatgtttgtaaagcacttggaattccttggcggtaacactaaacaaacaccattacctcaaagcttctttaatagcgacatctgtctataaaaaaaagaaaaacttccattagctcccataatcacggttataaagatctcctgacaactcaaacaaaacaaacaaaaccctcaaaaacaaaacaaaacaaaacaaaacaaaaataacaacaaaacaaaactctgtttgcttttctcagggaaagacaggaaccatttctttagggttcttggtttggctcctttggtaccagctgagccaacaaccctagggcacacagcagacatggctcctgacattccttagtgggaattctaggggaaccagactgtggtgacttgtgacttcaaagtcttccttttgccaacataccaacagctacgtgccatgactgtcagttatggcactcatctctgagcatcctgataaggccacatacaaggggacatccctgggagcatggccctctctgaaagccatgatcctgtccatccctccagcatgaagcacacacatgcatagcagtgtcattgaggaaagggacaggggacaggacaggctttgcttgcagggctttcctaacacagataagcaaaggatgtcagtctcctcgggtcacctctcttgttgccatacaaagtcatttttaaagatttttgaacaaaagtgcttattagaagctctttaggcgtcaaaggttatttttcaaaaatcaaagcattcctgcttctcccttcaaatgacatctggatctcacatgaaacacttattttaagcctctgactatgacttttgaaatgaggaatttaaagctatgggttatctctctgagcgagcctgagagatgggaggagcctcagcaaggttcctgaactctggattcacttccttccaaaggcacatcaggttcagccctgtttcctggctcccccttgtacccctgaggcatgcctgagacctgaaaaggggactgctggacacagggaactcctacttatccactgcccctcccccacagtatatcttaactctaagatttttaacactacactaacactacaatagcactttattttcttcagtattgctctgtatcctgttccagtaacatgtcccttgtaacaaacaacatttatatagacaactacttcccacattcatccatccaaactacttcccattattcaaatccctctgcacaaaggacatctgtgagcatgtgcctgcacatgtgtatgtgtgtatttcccaaatgcacccattcatctaccggttgcctttccttccaacctaatacactgcagagctagctctttgtatatgaatatgtgtacatatgtgtgtgatatatgtatgtgttaacatgtatacatgtgtgcttgaatgtggacatcagatgttgatgttaactttttcagttactccccatttccgttttggagacaccacctctcgctgggttccatagttccctgattagactggtttggctgtccagtgagctacagagatcagcccatccctcactccccagggtgggattacaaatgcatagggccacactggtcctttcattagggtgctgaagatctatctgatcttgggtttcatgattctgtgacaaatatttcactggctcccttagtccttcagttcttattaaaatagttcttaatatgaatgtaccttgatttattctaccatatctctgtgactaagtatttaggatgtttaacacacacacacacacacacacacacacacacacacacacacacacacacacacacacacatcttggtattataacacctattttccagagtgaaaaagcacagctattttcccttccttccttccttccttccttccttccttccttccttccttccttccttccttccttccttccttcctccctccctccctccccccctctttctctctcattttcttttctttgttaaactattctggttcttgggagaacacagaagtttgcagcaatcaacactgtcttaggcagagctgaatgtgtccccttcactcagttggcaccaacatcaacttttgctcacttggaagtgcctgccaccctgagggatggtatctggctgccggaattttcatctcgttgactcccagcaagcaccactgctcttccctcacccttagactttagattagccgctttaccctccggtcacatcctttccccatttcccactgagctctttgtctcccttatctactcctgggaaacagcccttggtatattctgacatggggccctttatccttcagacattttgggaatgcttcatttggtttgggagagctttttagtatgcctcaaagtttcatttttcttctcccctttctccctctccctgaccctctcctctctccctttccttccctttctctcactccactgtgtagtaccagggttcctgaaactagcagtcttcctgccagagcttctcaatgctaggattgcaggtgagggccactatgtctgcttctctctgtctctctgtgtctaaccccccaacccctcagtgtgtgtgtgtttgagacatggtcttgaacgtcctatcaccctgtccacattttctcaagatctgtgaccacatatcctaccacgccaaccaggtttcccatttccctttcttaagtctacctcctgtctttgcacacagatatcttttttaatcctgtcaatatcagaggtgcagatgtgctgtttgctattatgcagtattttgagtcttctaagtccctttgccagcacgggcgctacacgcttccatgtttccagaatgttctaccctgttctctgcacttccccaacatggccacttctgtgatcattcattccagaaaaaggaaagggggtcagggtggctgttgttatttttgtctttcacagcaggttttgtgagtcaaccctgccttgggttctgcactaaaatatgagctttattttgatatgcaaactcaagtttctgggtgtgtctttcagtgcttccaaagtgggatggctctatcattttctttctcttgtctcttgtgctgcctggtactgtgtactgtcagccaattacggactgatggaccagcacctcagactctccaccaagtctcctttagatcttattccagggtccttgcaggaaaagatggtgcctcgaagacatccttcccttcttttctctttggcctttctgataagaaccttttttctttaacccagcctaaacagacccagttgcatgtgaactgttgtaagcgcagcagcatgatctgccgcagtgagcatctaacaaggccacaggcacagcttgacgctccttcttgtcatcatttgcatacccagtcacgtctaggtttaggaatctagactttgaaaaatgtgtttggaaataatttccatatttatatttaatccatgactgcctttggccggttactgctttgttgtttactaagctgaggcctggtgtactggaccattcctgctatgacctcagtggccatctctggcctcaagatgccacccctggatgatgctgcctttccaggagaactccaggccccttgcatctattgttgctgtgggaccagcagccagactccacctgaaccttactgtctgctactgcttctaatacatttcctctggaattctggaaggggaaggtggaggaggagcaggtatcactaacaaaagttgttcattccttgggcaccgggcagccgctatagtcatttcagataacatcagtcacagagctgtgataacatcaggataatggcagctgtgagggttccagcttgatgccagactccctcggagtcacgtcagtttaaggtcactgattccaccaaagacagccattgtcacattgccagttactcacaacatagactgagaaacttgctgttcactgaggtagttacaagtgtgtgtgatacgcatgaatacattcacatttacacgtaggggtgcattgcatgggtcactgttcacacttccgtgtgtgggtgcatatttgcatgggtcactgtttgctattgctctcgatcactttccgccttgtacacagaggcaaagtctcttgttgaacagtgagctcactgtgttggcttgtctggccagtcagcttgctctcggatcccttggttctgcctctctcaaactgagattgcaggtaactaccacagtcacctggcacttacgtgaattctgaggactgagattcaggtcttcatacttgtcatgacaaggtcaactgctgagccatcgtttagccccgagaccgagaccttttatccttagtcagtttgactctggaaccctgtatgtttttcatcacaccattgttccctgcgaacattcttgacttttgtagtcctttataaccaaccagggagagactagaagagtttttatcaatcccactgacttccctcctcactggagcctcgatggctgtgtgaaaaggctgcgtgttgcacatgacaacagaagttcatggtggggtcatgcagacagaatggtggcaggtagtagggaactgacatgctgtgtgacacttggtcagttttttaacttctctgtgcctaactcattagtttttgcaagtatttgatgttttcttcctcagcctccaccttttcctaattattgttatttaaacaacaacaacaacaacaaccctctaaattcacctgtttcccaggaaaataatttttgtttccaagtagcaagggagaaacaaactctaacacaccaagattgtaactctgtttcagaatgccaaggtaaactccacaccatccttttggttttattccatactcgtattcaagcaaataaaggtaggatcacaggacagaactgttgctacctttttggctttgaatccagagaaacccctggctccaggctattgccacataatccccttcccaggaaaaagcaggtatcttacaaatggctttaatccctttatttacagagcattctgtacatggtttgttcaacaggctcagcgaggctgagggagtcagctcatctctttccaagtaaaggggcttttgaactcccaggcttgctttgccatctttggaaagccagccttcagagtgtccttctgggaactagaggagcaaagggcagcactgagttctgccttctccactggtgtgtgtccttccaaggtcctcccctctgccacacctaagctgatcctaagccattctgtggaacattcaggatgctctgagggacctctcagcctatgcaccaactttctgggcatcaattccctactgcaagattgctaccatggggcttgaaggcactcttcaaggctgctgatgctggccagatgacacatgatgggagagccttggggtgctggtttagtgtgttttggaaactaggctataggcttcaggcattggcactatttgtcattttctctccttgccattactctctacctttatcctcaggtgacagctgtaagggagaatcaaggtgtgtaacaccgaactgtcagttactttctggatgggagccctgacttgacaagatggtccttcacacttatggctacttatatgcatgtctatatgaagtcattcctgcactccactccattccgcctggtcgtgttagttaagagcagaggctgtgaagttagaatagcctagttggaatcctgcttctgtcactgctgactaagtgtgactctggagaaatcacctttaaatttcagatcctgtgttgtggctaactaccgtttgcctgccaacaagctaccctgcctctcttctgtaactcactctttctgccacatctttttcttttatccagggtcttctttctttgtgagctgctcttctgtcaactccagccacaggaccttgtgaaagtccttatgttgccacatatccacgagtaccctggactcagtcacaaaggagtggttgagaagtagggtacctgactggaagagtggaatcatttgaatttggggctttagaaataagaagagttccctctaggtcattttgtagcataagctgcagaaaccccaagcagccatgttccattgaccatggagaaactatccacctaccccatagagagaaagaagagcaaagccaatggccacaaaacagcaaatgcaaataagagaaaggagcaagatcaatgacagaattgaagttttctctctctctcctcccttttctgttgatactacctaatatcctgaagatccccacagcaagttgaggatacatcctatacctggccctgagccttgaggcagtggcttagaagtctacagaggagccaacctcactcagcagttcatgtgtcatttcgtgacccagaggtcaaaccctgctgccatatctaactgcctgcaggctttccagatttttttctattctccattttgtactccttccataagtccttccctgggtccaaagcctcctgatcagaatgttcctgtatgatcttgtgctggcaaactttcattgacaagttagcacagtctaagggggctgcgaagagagaacctcaactgaaggtttgcttggcctggctggtcaggctatgaggagctgtttcgattactgatggatacagtaaggtctagcccactgtgaatgttaaaattccttgggcagatgatcctgggctgtataaaagtactagcaaggggtaagccattaagcagcattgtttctgccctagaactttgctttgagctcctgccctgatttctcccagtgatggatggtggcctggaaggtgctctgttcatgctgtttgtcataacaacagaaaagcaaactagaacagatccttgcctagggggcttccacaccaaggaggtggcaagaccagggcttaggcaggctgacaccaaagcctttgtcttttgctttttttctttgccacttcaactctcagctgggcccacagagtccagagaatggcataaaatatacagtaataatgccctggctcatctgtcctgttctctgtagtagctatgatgtacctgggacctgtggaacacagaacgtcttaggtatctgaaacaacaggaggatgaatggttccaacaagaaacagtactgcaatgcagaaggccctaagtgccccctgaagaccacacagagtcagaggtgattttcctggttttcaaaggatgctaactcccaacctgccctgcttttggcttcctgatccatctcattacaccctccttcacagttctcctccaaattttaaatgcttttggtatctttaaagaaaacattacttaaaaatatgcagaatcctgtccagggatctcagacacattaagaccagcagggctttcaagtatgtctccagacgctaatgcacagtgaggcaaattgtctcacatttaataagctgacccaaaccagcaagatcagcttctcaggcaaaattttcagagctagaaaaatctagctagacctgagcaggacctcctggccagatgagtctgcagagagctgtttttatcattgcagggtgctcgtgcacaagtgtcaaacagaaggtaatgggagaagctggagaagagatgtgttgcatgaggataatgacaattttccagagtacacatctgaatgtaaactctgatggtcatgaatgtgctttccggggcaacagagtgacttcatttcaaacatgatcatagaggaaatctaaggcacggggtatgaatatatatgaaacccagcaagccaagccctacccatgacaaagactcacaggattatggagggactaatggcgctcaaacaaaagaggccaacgtttttaaggatcactgcaagaccacagatactgcagggagcggggaggatattgaaagctctgtgtctagggagatattcactcttccactcagttacctggctggaccaggggacagtttgcacataccatacagacagtatcaaaagagctcaaagggctgagctggtaatatggcttgatggatacaagcatccatatggtagaaggagagaactaactctcacaggttcttgaatgagttaaaaatgctctcaatggcacaaaccctctttcccaagcataaatatccagaacaaatatttacaactgaataagtgatgggcaaatgttaaaagaagttcaaagtccaccacctcccttgtcaatgcagggtttgaaggtacttaataattatgtacaaaatagttctgcctagatattctagacaatgctaggccaaactagggctttcatcaacactcggtcagccctaaactgatatgcctctcccagcctggaagacggaaggggtagagaaggattccttcctggttccactctctcccgctctgcttctggcctggttttctacgtgacatctgctttccccatctctagccttgtcttcctccggttcattctccatccagttctcaaggtgatctctctaaaacacagaactttcccatccgtgtgcttctcccaggccaccagtgcctcgtcattcaccttcatccaacctcagtggaaagatagacatgttttcctcacctttgttccttgtctcctcattcctgcctttgtttctcttcagcatgccacttcagtatcgttggcctctgcacagcatttgatagcaacactctctgctttcactgactcaaatgtcttcatacaaacggcatgttctaccccaaccccctggtgtcccctagtgccccggatgaacttcactctgctcttggggttcaacttaggcaatgcctacagtcaccccaaagtctctgcttaccatagccctaaggtggatttgagtttgagatctccttctttggcatttccaattcccatgtatatcgcaattaccaaactagccaaagaacatcactgtgttggtctttttcagaagaccaggagatgttggcaggactgaattttattttcttatatcccttaatgcctgacatagggagggaagaatccctcgattggcactgagtaaacattagcaaaacaagccagtgaacatttccaaaaaggatctttttcctgatgctttcgtataagctttgtcacattgactttggatttggctttgtgacttgcttcactaataggatatcaaaaatatatgacatgtgtggagatttgctgagcaatggtgacataggactcatgctcttggaatcctgctaacagggcttagcactcggtgagcctctttgaggataagttggaggggctggatcccttctgagatgcagtgttaacatcagaaacaacagtgaggccattttgattattcaggcttggttaactgtcaggtgactagctagatatatgaggccctgtgagtctgttccagggaccacacagctaatcccaactcaaaccagccacccacttaaagaaagcagaatgggaaaagggtggttgtttcatgccatcaaatttgaaggtagttgccaagtagcagaaatgtatcaaaatatattatttaggggaaagctttaatacatataccaggcagaaccaacaagtgagtaaagaggttaggagactgctcattcatcagaattctggccttgcaaacacgagagtcagagtcccattcccggaacctacttttaaaggcaggatatggtgacacacacttggaatgccagagctgtgaaggtggcgacaagtaggtcctcagggcttactagccaggcaatttagcttaccctgtgtagtccagatcagtgagagacccgatcacaataaaaggtgggccatgactgagaataagcaccaagatggtctttcatccttcaaattcaagtgcacgtatgtgcacacatatgtagaacacacacgtgcaacacccatgtgcaacataagagggaaaagcaagcaaaaactaatagacaagaacagcaaaacttcttcagtaagcacagcgctgacatctttcttaattatagtccattgaaacagaactaaccttacaataggaagctgcggaagcagtcccacctctcccactgaagagcctcgtgaatgtgacaattctaacctttgggcctcttagatgcttactgtaaaaatgggagattgtaattttatgtctatctggctatatgtatacatgtatctttcttatcgcacaaagctgataatacaaccggtcatatatggaactgccgatgtacaaatgttactgaaattagttagaaacattgagttacatcacttgctgacaacgtacttagccaaagcaggtgggctgtcgagggaagatgctccagggaggggacctagcagcaagctccttcctattgggtgatgatggctaacaggtgcttcgccaccgtgagcatcactgattagcattgatttctttaatgaggtgctatttcaggcagcactcctgtaactctcctcctgccccactcccagtgtttagcacctccttttacattctgctgaaggtcaggaggaaacctggtctccaaggaagaagctcaaggccaggagtatgaagacaacggtcatgctccatctctggctagctctgggattttgtccattcccattgcagaaacggattctctctctgtaaggcgtaaaggtcacaacagttgtcagcttatcaacaatgggttggagaaagaccagcataataatgcaaacagaagtagcttgaagctagccatccctgagctcagcacaaagtcaaggttagtatgggagatccctcagagaggcatacctggagtatagagagtgtcaaccacactccaggtcccaggctaagcggtaagggttgaaggagggaacgaggaaactgacattttgtgatgtgagacaattcgcctgcagccacataattaataaatgacttaattgaatcccaatccttactgaccttcttccaatgcccagatttgcccagtgctgggcagcctccaaacgacctgtccggagcctgtaggagattggaattattggctaggtagtttgccattaagtagggtcatcagcttgtggctaaagaaacagatgatcacaaaaaaagggctaggggagaaaatgcctgtttacaaacacagcttaattaattagtcaactcagaccaagcggaagaggcggcttcccagatgtctgacatagagaattaattaacagagaggcaccagtccccaggccttgggttcatgtccagaccacatggtggaattaaattactaaattgcctcagtgctcctcaccttaaaactaaattgtccctcaacttaactaaagccatttgactgaaaaaaaaatattcattgaaaatgacaactgaattgaaaagcctctgccaatttaaagctttaaatgaagctcaaagagcaaggcagagaagtttctaagtacgtttagtgtaacattagaaggttctagaataaaagtgaaggtgaagttaggttgagcggcacagataaaattccacgtctatacttgccactgtggtttgaatacgaaacaccccccacaggctcatgtgttgaatcacttgtcccaagctggcagagatattttgggagagcctgggagctgtggagggtggagactaacttgaggaattagatcactgggtggatccttggccgctgagttttgtccttccgttatagtttgaaaatgtaatgtccctccccaggttaatgtgcttgaacttaaattcccagttggtgacagtgtttatggaagggaggagaatctgtaggaggtggggtctagctggaggatgtgagacacgggggcggtgggctctgagcagttcaggctagccttggttctggactgagttctctctggtttccatcctctgcgacatgagcaagaatcccaatgttccctccaccctggaccaagctactcccaccaccatcaacactgccgtgccttccctgacatgaaactatgagcccaaagaaatccttcctcctttgagatgctgctggccattcatcaaaatgcagagaaaaatccccaatccatgtcctctctgcttcctgacacccatgaagtgaatcatcactccttcataggttcttgctaccatgacattctccttcaacatgttgtagcccagagtcatagctgtggtctctggcttgacatttctgcattccatcaacaaagaaaacctttcttccttcagtcctattgggtatattgacactgcaatgaggaaaacgggggtgatcgaggcaggaaactaaaatcactgtaacccccgttagggtttgtcactgtcttgcttgcctcatctttcaagccacaagccaaatattctagggaaaggcaaagcatccagatgcctccactttcaacatcattttgcttatataagataaaggattccttaggcaggagacagaaatatgagtctgtgggagtcacagctcaccggggtggaccgatgccggagtaaataccacagagccaatctccagtgaagcagtataacgtttccaatcctgtgtgggtctgtgaggaagtcacattccagcaatgcttccgcttccacagttaacattttctgggggtgggagtggggctccaacaagtgttctttagcctgttgtttatatttcgtcagttaatttccatgtattctgcactgtgtttggatctcatcttctgtctaattaagcagagggagttaataaagtatgaagtgactttgggccacagagtaaatagaagaacatgcaggggcattgggggagagggtgggcacacagcaaagagtccaggggtctggagaaaggggaagtggacaccgtggagttcagtgcacaccgtggggttcagtgcacatgaatgttgactgtctgatctagctctgacagcaatctagagaggtgtcaagtttgtgtccgaatcccttattcaccgttaaaactcttatttttcagaacaactgtaatgggatttctaagcagcatttaatctaaacaacagtgtcatcctgtggagtgcaagaattgagagcactcatctctagcaagctcttccttttacaactgggagatggggaaatatatcatgattcaaaatctaaaatgacctcaaattcatgcgcaggaatgtttttctgataaagggtgctcactcagcctatcttctgggaaggagcaacaggagaggcaggaagaggatacagtgtgaggccacggtccattgcatgcatgggcatctacactccctatcagccacaccttcaacctgtcttgagggaaaagaagccctcacttttgggagccttcatcttagaaggctgtggctttgtgcaagtctgcagattttttcatcaatggggagtaaggataaatggttcaaaccagtggcctttaaagtgtgacccccccagatcatccctcccacacccatcatcatcattatcatcatcatcactgccaccaccatccatcagtggcaacagcagcagcagcaccagcaccagcaccaggtgcttgggcattttctagtgatgaaagcaaccaggactctactccagatgtgcccagtgagcagtcttgttggtggaacccacccacatctgaatttcaaccagccttgcaaatgctatttacttttttaaaaaggaattcatggaagaaagtggggatgggggttgggtgggagggtgaccaacagggtccatgaggacattgaccagaactggaaatggaagctgtcagcatactcttgcgtcatcaagagccacagggtaaaattcaactcttactctaatgaggattttaatatttaccacgcatcccctgcctggcttgctgcaagctgttgaaaaaaaaatgcctcttttttttattcaagagatctgacttcaaacagataaattcccattttgaaacagtttcctttgctcctaggacaggttagtcttaacggatccattgctattgttaacacttgcctttggatgacaatagattagatagaaatgtgcatataacagtttttaaaagaaaaaaaaaagagatgatcactgttgtaattgactttccgaatgcattcataactcacccccagctactgacataagcaccgcccccaagcccacccccacctgtttctgatttttccttggctccaggccggtctcagcacccacgacgcagctgctgacaggaggaaggtgcagaaatgatggaagagctgggtcacagtagataattcatttatggataataaaaaaaacgggtgtcacacttcactgaccatggcagccctgagctgttatacctacattagagatctttcagactcgagacggatttcaaaccaaaacaaaaaacccatacaatttggccgagttactaagagtgttttacctcagccgagaataacaggcagaatcagactctctgaccaacaactgtttactcgtggcatatcttgtgctaggttctcagggagatcctatacgtaatgcagaggagatatgttgacccttccttcaaggagccgatgataaaatggaaaaggaagagatacatgtcctgaagactatgatgacttaactactgaaggggtctgtgaaatgtaaaattataacagtacaattccacatctacttcatgacactccattttggctccatagacaactttggcggccattctgtggactcacatgaatggggcttcagctgccttcaacatagggctgccaaagtccctgggaggtcccttcattgcagatagacacaaaagcagcatgaatcttggttgaccttgcattaggaaagatttttatgggtcaatcctgaaggtgacatcttgacaactgctaacttggctcctgccagtcacagtcacacagggtaacaggagtcagatatgtgaccatatctcactgcaacagggaaatagattccctgtgtctatgaagaagaaagataaacacgttttggttagaatatactaattcagccatgtaaaacatgactggagatgaactaggagactggatgttggtagtgactttctccacacagcctccacagatgtaatcttattccactgtctcccactatcctccattgtcaaagctcccatcgtctgaatccttccttagagtgtcacagagcatctgatagagcagtctaaggatgggtgttacaggagtctgtgggacagttcatcaagactggggaaattcctgttacctttgagtccctccgtccaaccagtgacccaattcacagaaaccacagcagcgttgggccttgttggaaaacactaagttttactcaggtatctgagctaagagagggtccagtcaggcagggtgctaactgttccctcagcacgaatgtctgtcctagagtctgaggggatgtcaatgctaacgaggggtttaggattataggacgttaagagatatgtgggcagagagaagaggagctggggaaataaagtcagtagaaaatggggaggggataatgtattttctcctaggtttacaaagagcgcacatagatagaggacccgcaaaagtttccctgtgtaaggaatatatttcctgaccttgaccttgactttgacctatacctacacctatacctatacccctgccatcttcccctcaactggcccaggcagtggtttgtcagttaaagttagcaggaggagcagcagcagcagaagacaggaatgcataggtaaacatgtgtgtgtcactcttcagcaaagagacttttccaattgaaatcaacagacgctcagtgtctgcggtgtttgttgaaaggaacagacagaagtcgtcatgaaaaggtacagaatgagcacagaagggagagcatctctgtgaacatggccctatcgcttgctgtcctgggcccagccattcttttactttaagtgacatactgcttcatggaagcagtttgtaccagcgaggaggtaaatgcttactggattgccacacattgtgtgccggaaggtattttacatctctggcattttgttgtggagaaagaaactcaaacaggatttgtgcgtgcctgtacctgtcattagaatactagcccagcatagtctcacaagagacagctatatcagtgcctggcaaacacagaagtggatgctcacagtcagctattggatggatcacagggcccccaatggaggagctagagaaagtacccaaggagctaaagggatcctataggtggaacaacaatatgaactaaccagtaccccggagctcttgactctagctgcatatgtatcaaaagatggcctagttggccatcaatggaaagagaggcccattggacttgtaaactttatatgccccagtacagggggatgccagtgccaaaaagggggagtgggtgggtaggggagtaggggggagggtatgggggacttttgggatagcatggaaatgtaaatgaggaaaatacctaattaaaaaatatatatatacagacaatcggaaaaaaaaaaagaatactagcccagtcttcttttttctttcaacaaagtctactgcatagcttctgtgatttgaatgtccttatccaaaattcatgtcaaaatttaccccccccgtaaagtattacaaggatagaagtttaatgcaactttatatttaataataagtaaatccgcaaggacggggatctgatctaatgggactgtagatttctaagtaaggacaggaaacctgagctagaaggctttgccccttcctctacttcatgctacgacctctgactctgcagcatctttaccaacaaaaagaaccagaatcagccacccagtcttgaacttgccatcattaagaagcacagattgaataaaactccttctcttgcttactattcacccaatgacattcagttacaacaacagagaaaagctactaggaaataagccctttgctttctgtagggggcggtgatgacaactgtagagagaataccttgtgtgttgtatggatatatcactgtcaattaaaaggtctatggcctatggcttaggcagagaatagaaggtgggtcatcaggagtagaaagaattgtgggagagaaagaggcagggagactggcatgaaagatgtgaccagacagatacatggtacctgagcacaggtaaccagccataaggcaaaatgtaggctaaaataacgggttattttagttacgatgtagtcagagtagagcctaacaatatggccaaggtattggtaaatatattttgcgtttgagtcttatttctggaagcatggggcttagaggaagaagcagggcttaactacaacagacaacccttttcctgtctttcagagggccaccttctagctagaggaagagatgaccagctagtacaaagccatccatcatttaacaatggggatgacttctggcagtgtgtcattgggtgcttttgacatcatgtgaatattataagtgcattatcttatataagaacaagatagtaaagacgtcaggaagaaatgagatcttatgagaccaatgttgtacatgtggctctactgtgaccacaacagtactatgaaggttggaagccatcagctagaaagagctgctatcatgataaaggtgggaaagaagatggtgtgtggtgagatttagacaaggggaagtctaaaagaattatcatcttgctattcgaccttgatcaggatactgaggaaacagaaactcatccagcagagatggcactcaggagtatgtggggaactgaggctggcaagattaggaagtgccccaaagtttgacagctgtcaacttgagatagcctagagtcctccaagagagtatcaactcagagattgttcctatcagactagcctaaagtcatgtctatgaggcatttttcttgattgattgatgattggtgtgggagagaccagatcattatggaaaaccttccctagcatgagccaaagcaagttaggctggcagcagcattcttctcagcatacttccatggtctctgctttactttttgctaaagcagagttcctgcctcatcttcccttaacattggactattacctggaagatcaagctgaaatgatttcttttcttcccaagttgtttttgatcagagtattcatcacagtaacagaaagcaaactaggacagatggggacgttgtgatgatgatgatgacgatgatagagaaatacagtatattcttggaatgtaaagacaatggggttgataataaattttatataggagaggagaagagaaatatagacataggaacacaggcatttagatgtaactcattgcattggatattataatactgtctttggtgagcaaatttacttacctgataagaaattacctaaaaatgaaaaggatacttttagggcagtgtgcaagaaaggggactagggtccacctgagtaaatgatgcttaagttgaactctgaagggcatgtttctctctgttcaagttatatcacagcactggtcccacagtcagcaggctaaaatatgcatattaaaaagtaacggggcacggaagtaggagctagctatgcttttcatggatatgtaagctgagggctcgacgtcctaccacagagagacttgcatgcccatgtttattgctgcactgttaacgataggcaagactgggagtcagactaagtgtctgtgaacaaatgtatggataaaaaccaatgtggcccttgtatgcacaatggagttttattcaaccacaaagaaaaacaaagtcttgacctttgtgggaaagtatatggaacaggagatgttaggtgaagtaaggtaggctcacagagatgaaactatgctgcctttccccttagatgaaggccgtgggctttaatgttctatgttcatgtatctgtatgggaggatgatcataggtcatgagaactagaagagataaaaagagatctcaagaggggagatggaaacaaaaagatgtatggaggtgcatgccatgaaggcagaggtgctactagcgtaaggggtgtcaacaagatcaaaggatgtatgctcatgtcacggtggcagctcatgtcacactgatggccagtagttactttgtatcctagttctaaaaaaacaataaaaataaaataaagacaattagctatgtaccggcatgtatttacttaagaaaaacaaaaaccctttggttttagagataatctgtcacctacaaatgtaaatgtcccaatttccaaactgcttacaattccagcaagaaatagttcacagcttagtcagcattttctccaagtgataaaggtgatcacaacctgaagccttttctaagccaatagattgttaccctgcaatccgaagccttccctaaaccaatagattgatacccttcataaccgaagaataaagagcacccgcgtgaaaagatttactggctttcttgatgcttaggacattagaactctcctgtgtacaaagatgctataaagactaaacagcctgtttaaagagctcgctgatgatttcaaggaacctctgcatttcttcccctctggcgctgaagtccaggttttacttactaagaatcagaacattgtttccctaactaaggcagcgcttggtgaagcgtttagtcccagacaacgccactgacctggaaataagcatgcatatctaaatggcaaagggagttttaaaggaacaagacaagattcccgactgacgtggaaaggaaggagtctgctcttcagtggagacctgctgccagctcttcgcttgctgtccctgatggtgaaagttctgcgctcctttccttaagccaaagaggatgaaaacacaacagagcagtaaacaagatctgctgggcgatcgaccctgaccggtatcttcaatgtttgcactcaaaagagatgttcccagaataggacacctcctgaccatgtcctccacactttccttcacaagggaactaaaagacatcttatgggatactctgaggactcccacagtacctagaagtggtgatgatgtatttaaaggtctgtaagaagtacatcaaagccaagttatgatcatatacgcgcatgggtccctaatggacgtgcacacaggcaaaaggagtcaccagcagaaatgaccactgaacttgggccagagtgtgtagccggcaactctaggggcaatccaggaacgtgaatccacagagacagtgctgggccttctagttttgggtctatgcctctgtcacagacatgcatcttaacttgcaagattaatgcctatctggtcaagtacaaacccaatagacttcggtttgaacttcggtttcaaaatatctctgtgttgaacatgtaaattccagggtacatatgtccatactgaacagtgatagacctgctcagcaaagaaagatgggggaagcttctggaaaatcacaccatcccaacaactgggtatacctggtgagagtagtcagcccaggcctgctctatcctcctctatagaaatggatggttctgaatcctctcatgctactccattgggacttcaacacccccccaccccccaccccccgcctagtttaagttcctcaattatgacaacccatggagaagactaaccgtgctctgtgccttgcaccctacaggcaaagagaaatgaaaggtagaatttatgggatcactcttattccttgaagatggaaagtctgcactccagggagatatcttatattctctctattaacttagaaggagaatgatgcttgcaaagtgtaaagtttgtaacttgccaggggtggattcaatacacggcagtgtaacaattggtatgccatagtctctcctgaagccgctatctttctagggaaggtaatgcgggttgtatcatgcctgtcctactaaagattcctgcagattgtcaggggcaatgcttgcctcacaggctgaggcaaccagtgggcagaagctcctgatgctgggcagtttgggacagaccacaaaccccacaggattctgtggaggtacagcttcagtgtccagacatggagaggttgacctatgataacttagcagtcaccacgctaatagctatttcatacctgaaaaccagcagtgggtcacttctctgtccgaggtcccattttcttttaagattccataggtcttcaagctcccttccttctgcaaccttatctcctcttgaaatggacattcacaaacttctttttttttttatttctgtgcattctacaggtcttgactgggcccaatactggaggaagtttagaaaaacagtgccatatagataggtacccggccaacacccaggtcactcttgccagcacctaccacaccctgagtatcgggtttgcatttctctacctagctctgcagccttgatcatctctggttccccatttgttctacaccttgttctgtctctttcctctactcctcattttcacgcttcattcccaatgcctctcatttttccagacccccgaaactccctcccctcactttatccctcatgttttcttgaggcaaattatttttgctgaaagagctaagctactacaggtaataaagcatgttcaaatgatatttcttctctgacagagtcctcggacagggaagcagcgtgcccttccctcggcattctgcttatgcgccggcatgagaggtaagagcatccgtgggaattcaggccaggactttgtataggagtcagacactaacaagcaacaggcaaacccttccctatcgatacatcttctctttgttatctcccagagctgttgtttctgatcctggctcctctccacacacctcttcctggatgatggttctctatgctgaacccccctttaaaaggaaagaactagagatgatagtgtgttacatatcaatgagctgctgggttttcagacataataacacaaacattaaatacgctgaaccatcctgaactcttcattgagaatgaagaagatgaggtccaaggggtgaccgggtttctgtactccagaaacaaaatgtgggaatgaaaagaagtctatctagaaaatcgatcaagtaggtaagggtcaaagtctttacctggccaggtcaacaaaaaaatattgaaaaacacttatttggaaatgattttaaatgaggaacaatgctaacctattggtatagtttagcttctgttgtcccaacaagcatgttggccaaaaaacaacttgaggagtaaaggatttattttaacttacaggttctagtgtatcattgagggaagccaaggcaagaactcaaagcaggggcttgaagcaaaaacctaaggaggaatactgcttatggagtgctcactatggcttacttcgctaacttatacagccccatctcatctgcatagaaacaatccaaccactgctgggccttcctacctcagttagcaattgaaatatgcccccacagacatagcctcaggccaatgtgttggagacaatttctctgttgaggctccctcttccaaggtggctctgaactcctgtcaagttgacagctaataaccatgagtttttatactagggtgcttttttggtggagacaactgtagtataaggagaagcattttggttgaactattcacagatgtttcagagtttcttcttaccaggaggcactggatcccccactcgcttcaccctccagatactcatcccaactagcagagttccctctgcaaatgctgactcaacagtccttaattacaccgtgttaatctgaggatcaggagaactcacaaggctttgctagctctcagcctgtccagcccttactgtgcctcagatttttctttattttctcggtgatcttaacttcctttttgtccttggcttgacagagcttcatcctgttcctccctgattacttgaccaatttgttgaggccattcccacttcgcctcattgttggacttaatgaacacgttgtggcagcatccaagtcagggctgacagtattaactagatgtgggtctcggacctagaccagtgcggcaacattcttatgtgttcacttgtcaaaaggaatatgtgtgcaagcactttaatgaagttcattttagaaaatgtgaaatacttctctaaaatctgggatgtttccaacaggaactgacattttttggcaattcaaaactgtctctccacataggtgacattaagcaatcaaagtcattgttcaaaacataattttatttctttaaaaaaaaatttcaactcattattttgactataacagctagtaccctgttgtcaccaacatttttctgggaattagtcttgctgacactttgtcctgctaaaggagatcaaagccttgccatcttgctccatctctgtcagttagtgtatgaccttgggtggtatatgaccttgggttagtcacctgaccttgctcagcctagacttgagcctcatcagtaaatggtagatgtctatttggtgaccactgatacatcttccagattcaagatgttgtgatttttctcttaattaagaaagtaagcatttccagttgcaaattactacatgaattctttgattgcatgctttcccatggcatttatatattttattacaattttgaacacacttaaatagggttgggttggatttgcaaatcatttagaatttgttatctgagagccaggcagggtggttcacacctggaatcttagcactcaggagacagagactggggcatcatcttaagttccaggtcactgggtctatccaatgagttccaggtcatgctgagctatagagcaagaccctatcttgaaaatatcatgtgtacatttatgtattccttttctatctaatcttgaatgtctgaatgctgattatgtgatgggttatgtgatggctcgtgttctcatggtagcataagcaactgatattttattaacatttctcacatgagaaaacaaaaacaaaaacaagcaacctgaagcacaagctggtttgggactgcctggagtcacacaacttgcttatgaaggagtggcagcttgtagctgggttaggacgtagttctgaggtcctctcgcctggtgggatccttcagacacttgttaaaactcagtctgggttacacaggaaagtgctatcactccgcagcactaaattgaaacgtcttaccacacaatggaagactgtctctctcccagtgataaatgaccatcaacttagcctctggagagagagaaaaaaatattctaaattttcttacatcaggaatatataaatgatccttttatggaagtatgtaaagactattttctaaaagatatttggctccaggcttggtaaagatttataatttttaaaaggttaggcacttgatactaatctctttaataaaaacagctctgttctctcccccctaccccccttaacttcagccttccatttctcttccacggttttcatcctccaggcagggaaaagacttcaacagctccttcctcaacttccctaacacctttcccctccaattcgctggcttccttggactttcttgcaaggcagtttctaaataaatacatgtttctccaacagggaaaatgggaaggtattttagtgatttaatgtggattaagggggtgagtagaaaggaagagatgtatgaaggatatgttgagaggagtgaccagaagagactcaacaatctcttcacttcaataaaatatattcttctagtcagtcactagagaccattggaaggcttaaaagcactcacaagacagtgactctgataccagaaaggagtagtctgcagtagctgctgtgtgggacaataagaaacaagagctggccacaatacaagtcctgggcatagaaagatggctcagaagttaagagcacttgctacccttgaagaggatgggtgttcaattctcagcaccaacacggtggtctatacctccaattccagggcatccagagccatcttactcttctgcaggtgccaggagcacatatggcacacatgcatacatgcagcacatagcacgatgcattcatgcaataaagatactcttacccatcattaacaatcttcaaaagttttgagaagtgttctctatgctcagctgcataatcacatagacagatttttttaaaaaatgacttaaatctaaagaaatcaaagacaagtcacaagaggccaaaactaagaggatcatcttccaatcacaagagacaaactcagagaagtacacacagtaattctaatgatgggctctgaccctaggtatctatctgctcctagctcaccttcctgcatacctgcccctcatcaactcatttgttcttggtcctctcatgtgtgtcttggaaggaaccaatgctctatttacatggttaacatagacaggttcattaagtcctccccatctattaatgtggtggaactaccacagtagattcagagttaccagctgtgtgatcctctcctctgggattcctctaactgatagaagaggccagatgagacagtatgacactcactttcccctttttatatagtctctcatatactataccctgacatcagtttcccttctctctcctcacctcagtctcccctctacttctcctttcctctagatccacaccctatctaccttccctcagaaaagagcaggtttcccagggacatcaacccaacatggcataataagctacagtaagaccaggcacatactctcacgtcaaggctgaatgagctaacccaataggagaaaaagaatcccaaaagcaggcaaaagagtcagacacagatcatgctcctactgctaggagcacaagaatatcaatctatacaaccataacatatatgcagagggcctaggccagacccatatagaggctccctgacttatgtgagtctacttcagtctggtcagttgattctataggccttgtttttgtggtatctttgactccttagtctcctccaatctttcctccccctcttcaacaggactcccgagctctgcctactgtttggctgtgggactctgcatctgctctatcagttgctggatgaagtctctctgttttttctgatgatgactatgctagactctagtcacagcatatcctgtaggcatgacaaactaaaggttggaggtcttgtggctatgttggtgtccctatccctccactttggacctggcctggttacagaggatggctggttcaggctatgtgccctccattactagaagtctttgttagtgtcaccctcatagattccatggagtttgcattgcaccaggtttctaccacattcccaagatgccttttaattccagtcagctctccagcattctctacctccatttccaacccgatacctgttgttcccatccttgtctacccccagaccacccaggaaatatattctatttccccttcccagggatatccttgcttcccctattaagccctccacagagagactaggttatattgtaatggcaaaagttgtatgatgttccagtatgattatgatatgttatataagctgtcttaatagacttttggaatgagcctcctgctgacattgaaggagcagaaagcatgctattaactatctatggagaagaccacatgactagggtctgtgtatggcctctgaaagctgggggtccatccaccatccagtaacaacaccagtcagtgtgataagagctgaagcagatgaaccagctaaacacacgtccaggctcctgaacctcagacactgtgaaaacatgcctgggctcctgaacctcagacactgtgaagcactaagtgtactctaagttccactgggcttgtgggaatttgttgtccgacaattgagaactgtaaaccaagttttagagaggttagttaactgtattctagatcacacaaccagcaaacaacagaattcaatttatacatcaatctccctaaagcccagaagaccagatgttttccagtacattcttgccttcggacttcccttctcattgttcttgttgatatattattatcagtatgggttatgaaattactctgggcagtaatgaagctgttatgtttatgagcctgaagttacaatttaaagactggggggtattgtgttctttttcctgtgtcccacttctcatctagagagcaaaaggagagggggagggagaaaggtagagaatagagaggaggatggggggggggcggaatcacacctacttgaagtggggaatcagataactgtccctgtgttggttaattttttttcccactctaataaaacacccgaaggaagtaagtgaggaaagactaattggcttcatggtttagggggtacagttcatcacggcagagaaagcatggcagctggagttacctggccatggcttaattgaacttggtttggagagccagaagcctgcagggcaatttctacaactcttcagagtttgaatgagagatggacagcatctaaccctcaagcttaacttctatatccctgtgtctatcagctacacttgatgtctgaaaggctttacagcccttcccaaacaacactaccatccagcgaccatgtgtcaaacacatgaacctatagaggatgtgtcacattcaaatcataacaagggaattagatgaatatcttccaaagagaagcactccagcagggaaagagctttgaggataacaggaatgaacccctctccaggaacacccatgagacaaaagtctggagcttgtgggtaagtttccgtgctttggggttaacgcctggttacaattaatcccacagcttaacttccatactgttggtttgggtcggctgaaagaatgctggccgagggctgacttggagcttgacaagtcaagggacattggttcagagatctaaggggttgtttctttgatgtgggttataaaggctgaaaattcattggttaggcttggctgagcttgtctgttgttgggccgagttggactgtattttatatgtgcctccgttaaagcactggaacagtaataaactaggtgtatcaaaattttgacacgccaaattacatgggagtgcatagggagcagtatacagcccagcttgggctagttcatcacaatgctccattatgaaatctctgtttagaaagagcttagcagttgatgcccagggctgggtgttctgttggaaactgggtgagtcctgtgcactttcactcttctgaagtccataacccagtggcacagggatgcctcagcaactatataatcttgcagacatttggaagaatttgcctctagagtaggtgatggtgaaagtcacagccagaaccagtcagttaggtgacagcaagtcacccagagaaaccatcatcaggtgtgaaacacctaagggaccagctgtcattcgctataagaattcttaacatcttaagagaagcagtctgtctttaaatgaaagatcttagctattgcaattatgccccaatgacaacaggcaaggtccagttgtagagtaggaggctggtgaacatttctgaatttcatcatattcacattctgagtcaatgtggaattaggacctgaaaatatggatggaaaaatccctgccccagaggctcttgtgatctagttaaagaaaatgatattacaggagaaactgaataacaaaggggcactgaagccttctgagctttattgaaagtcttgagagtccagtaccttttacaatttatgacaatattaattgcaacacattccctgagtgataatattacaagggagagggggaaaccaaggggataagaagaaatgatgtacagaaaatggcgcagtagacagagacactttagttacacaccggtttgaatgtggctttcccactaatttgcttgtgtgatttggggtaactttacctgccatctcatctcccatttcctcatgtttaggcaagcagtgctgtcactgtctctgaagtgctcattaagggtaagcaggacaatgcttgtcagaactacagcaatataaagttcgtgtagctgatgttcaaaacacagtcttcttaagcctggcaaggtggggtacaaaggtatgtcactaaggtatgtcactacctgcgtggtggagtggcctttcagtcactcctcactctgttccctcgtttgtaagataacaggttggatatatacattctaagcaactgtgtcacctttaacaagttaacatttctataaggaagtggacattatgactgcacacctccctatatctcttcttgacagtcagtagtgtccttcatgggtgctcagcagacacatactatataccttctgggtgacagccatgtgacactttagcttccttctattgatggctcctaaggggttctactagaactaagctcccatggcctgctcaaggcctctagagcttagctgttttctttcttttcatctcccaagagtttcatcccagcctgagatctctccatcatttccatagtatttgtggtattattcttggccacgtgccatctcccttctcctacagcgccatcttattttctatacatttcttcctccactagccagcataaggtccactcttctctcaggatcccacaggaagtctccccaaacactggaggtgggggctgtctcagtaacacaggcagatcctcatagaacttccatgaaggggacaggatgtccccatgtgtctttttatctttgcaatcaaatcctatgagctacaagcagaaaatgacatcagcctccccccacccttatgctctcaaccaagattacattccataattagcaataggcatgatggttaatctttattaccgacttgaccagatttagaatcaccatgaaaacacacctttttggattatctctagatgagcattttgggggaggtttaagtgaccagaattgaacaaaagagagaaaatgagctttgagctgagaggaactgtttctcccccctctgcctcctgactgcagacgcaatgggaccagtcacctcacagtcctcctcctcatgtgacgtcccctcctcatgtgatgtccccaccacgatggactgaacttcatctaggaactgaaagcaaccctttcttaagttgcttttctcaggaagtttgtttcggcagcaagacaaatgattagtaatgatagacaaatgtggccagggacgttctcccattaggtaatttctaattcaccccgtgaggtcgcccttctcttaccttatcgataatgctgacacctcccttccatcgcctccttcctttcattttctctctgtagcatttcccccgaactaggatggtacactatttatcacttcctaatgatactgggtactcgatgtagcagaaacttgtgttttttcattttaggttttggtgttatcattaaacagtagcgctagagcacttggtgcacagtaggtacagagtagttcctgagagaatcaaaatatgcagaactctctgataaaagctgtcaagaaaatatctaatgagttcagaaaacctcttcctgtattttatttaatttcttgacccatagatggagttttctccctaaacgagaatgatggtaacttggaaccctttcaccagggccaaaggaaagagaataagagagacagcaagaacatgcttttgcttcaaaagctgactcctgaactaacctagattttttatcccagaggactggaagtaaaccagataatgtcgtcgtgtggcaggagagaggagaaatgataagaactatctcacttgaataaagataaagataaggaggatcaagcagtgtgagagatgaaccacgaaggagtcaggcagactcaggggttcagtaccataccaaaactggctatgtgatcaaccatgtgttacccactcatgtgaataggtcagtgtccagcatctttctcttaacccagtggagaaagaaacacaggaagtatatctacaccgcagaaagagacataaattaaagggcagtggtttgagggccaagggatagggaaagcattttaaaaaatatttgaaaaatgttctccaagaagataagcataaacagtggttccatgcctgcctgccagtgggttggttggtaacattttgtttgtttgtttgtttttagttttagtttgttttttgttcttttttacattggttggaatgcagagcaatacagaggacaggaccatgtccattcatgcactggacttcaggtcagaggacggcacaatgtctgtccatgtactggacttcagatcagaggatggcacaatggccatccatgcactggacttcagatcagaggacagcacaatggccatccatgcactggacttcagatctacagcgccctcactccttagcttgactctcaccctcagtcccttaccagcagtgcttcctcatcactctatccctagctggaaccacccagcatcacaagttgttttgtagtgtcagtagacagaagtcagtccagtgtccagaatccatgccaagagttcacaaagcttggaccgaccccagtggctccagggtttggcaggttttctgatgctaagccagctatttaatctttccagatcttggcaatcccatctgcaaagtggggatactattcattgagaggatcctgtggaagattagtaaaacactccagaattgtatgctgcctttgttaagtggttctgagcatttagtgagctcctggctgtgctatgtatgaggtattgaagcctgaacactcatacttttgctgttctggaacgcacagtgtagagaagagaagcagggagaaatgagcagtgggaagcagttaatctcatagtccttatgagaatggttccaagacctccttggatccaaaacccaacagatttttaagtcccttatggaaaagcaaatcacacattcatgaacattatctttgcatccttgtataacgacgtatttattcctactttgtgtgtaaggatattttgcctgcatgtactgtacatgtctgtgtactgtatagtgttctggtacctatgaagaccagagggtttttgatcccctgggactggaattacagatgattgtgagctgccatgtagatgcttggaattaaccctggagcttcttaaagagcaactagtgctcttaaccatatctccagtctcctcctggattcttactggattacttataatatataatataacattagtggcatgtacataattgtatactatactgccgagggaagaaagaaaggaaaaaaggctgtacatgttagttcagttgcaaattcctttgctatgtatttctgatctacatttggttggaccacgggacacaaaacctggagctatgaagggttgactgtatgctaaatgtacagatggagtgtctactgggtagtttgagaacatacataattggttcctaatgggtcctttgaagagttcaagcttcccacaggaggtagcatttgtactgaccctggatgagtcactgagacttagccaagcagaacaggtctgaaggagaaagaagaaacgtggtcttgctaagtaaagtggaagccatgtatctatagaaagaagcaagtgtccagggtggtcaaaagaactgtagtcagtgtctggaggttagagctcttggtctgagctgagaaacactagaaaatgagaatagagagacaggtgagaacctagaggcagaatatgaagaccaacgttcttcagtgtggctttgtgtttatacccaatgccactggagagctatgacagagtcttagtcagggaattgacatgactaattctgtgtctggggaggagccatgtgacactgtgtgaaggctacattagagtaaggagagatcaaactaggggaggaagtaactgtggtaagtcatataataaacgacaaataagagaagagatagctccaagagactctaagaactcaaagagatgagaaagaggaacctaacagcttccagcttctacctcggatattcaggtggacagtggagacaggatttattcaaagaaagcctaagccatgtcttagtgcctctgtagagcataatagtcaaggcttaaaagacagtggtggggagttggggagacttctcagtcaacagtgtttttgtgtacttccctgaacccatgcaaaaagttaggcattttgtcaccccatttctgttatcccagagcatgggaagtcagtccctggggctggctgagcagccagcctagcttacaggacagactccaggtcaatgagacatggctttgaggaataatacacaggttcttctttggcttctatgctcatacaaacacataaacatgtgtacttgaatgtgcatagatgtgcttgcacacacacacacacacacacacacacacacacacacacacacacacacacacacacggctgcaggctcaagggaagaatccaggcatatctattgaaagtttcggttttaggcatgtgttattcttaaagtctatgtagatgggtttgtggaacacttcagtacattaacaaataagagaaagtggaatgagggtgaagatgaaaatgaaggagacagaaagaaagaagcagagggcagagggcagaggtcaaagagattccaaggagagagatagattgggggagaggagagagagagagagaaagagagagagagagagagagagagagagagagagagagagagagagagagaggccaataatgcaagtattaaagaagtcacttaatatgtctaatcattgattgaatgctggaactcatacgtgaccttcggaagaacagatataatgaaaacacacactgtaatattaactcaataagcaatatccatcttgttcatcagtatagacagtagaatctggtatggcattgagttcatgtcttagccactttcaccagcaaatctcgtctagaccactcattggtgacattccctgaccatcctttgctttttctgcagtgcagaccatgatgtcttcatatccaactttgcaattgctgagccaaaggattgaacagttaatgctttatgctataaatcgtacataagaaaggcgcttacacaaccatgtttcctcttttctgtgctcccctgcctctcaaaaaaaacaaaaaggctgtagctttgcttttgctatttccctctgtgacccaaagcagaggtgggctgctgaatagctggccctgttggaggagcaccataggatccctggataaaaggcaggtggagaaggtagttgttatttctagaattatcacgataagagatgtaatgaggagctcactgcagggcagggatggaaagaggaagggggagacaaagaagggaaagaaaaggccctggtttccatgaaaagcagttctaggaaaatatttgaaaatataatgtgcacactgagaagtaaaccgaaagcaagaaggacggcccttgaggatggtcggcttgccccatttgcttgtttatgaaagaccaaagtgaaaatcttgacagggtgtgtgtatatctctaaagaaacccctggtgactctacagcctatggctgctgattaggctctggtgcaacacagaacagcctgatgggggatagtaaggtgaaaatgagaaaggtgtttatgtcactggccccctggaccactcactgccaatgagtgaaggggttccgcatctgagctaatatccatccaagttctggtgtaccgcaagtgccaactcttctatttcttaaccaaaactacaaaaggctgtaaagtccagttctcctcaccctgctggtgcctggccctcaagcttggtactgttcagataaccagggtcccggtgtccccatccaacaggtaggatatgattacaatagagagaaaagtgatttgcccagcccacaaaagccatttagaaggatatcttatcccaagtcacaggtgcctcactgaagttttcacaagcgaaagacattgtcagtgaagccgggaacccagggaaacaacaaaacattgcagctgaggaagggggtgtgatggtgtgagtcttcacagggaagaaagaaatcaataaccctctctaaccctctcacttgggcttgctgccgagacaagtctagctggccctcacttccgaaaatccagaaacattagacaggaagaggtgggacggtagctactgatcatgttgaatgatttaccattgaaacaagaaaaactgacgtgccaagatctctgaaggcgttcctaagatgtatcattgtaaccttcttttctctgcacagggacatcaatgggacgaatttttctcaggagcccttgaaacccctcatcccagaacagagccacacaactcagcttaggattgtgcctaagctccttgaattgaaagccaagatactagctagccacactctgcaaatgaggctcatgcctggatttcacagcagcgaccactgatggaatgaatcaggtacagagactcctggaaagccactgtccctgtgtccattctgggccgccgatggcatatgagtggaaccagcttttctgtgatattcagcctgtgcatgttgggatggaggaggctcattacagactggaatttagctatgacccagatcctggtgcctccacaagctggctgtactctccctgggttagtatatgtctttccccctttgtccattagcaactgggccatgaggacagtcatttgctttttgttactctttaacagtgtctccccagaggtgctatgaggattattttgaattaagtgatctgtttagaatagtgcttggattataaacaccaacacactgcagacagacaacagtgctacttattacaagcttgctcttatctgttaaccaaagtgtctatggcattggaaaatctaccttatcctgaagagctgaccccactgaatctgactcttctttctgcttcccccacatcctccccacatcctccatggaggtagtcttccctccctctcgagactgctcctcctacattatggtcggtcaccctttatttcatctgttctcttgtgtacccctcccatctccacttacctaccaccaccccctgccccatggtattgtcttagaaaacatattcttgcaagtcatgatgtgaattagaaatgtcttgaattacccgagtatagacataggatttagttttcaaataccaccgtgatttcaaagtccagaaagacaacagaggaccactggggtcccaagtgctgtctctaattctgacaaaaagaaatcacaaatacctacttgctaaacatcatctagaaataagacaaaaagagaaagggtgttgggctgtgaggtcacactgtggtctgggtgttatctatggcataccagtatgccaggctcatcagggaggagcctcggataggaggtaagtctaggacagtcaggtaggacagtcggaggtctctgaccactcagcaataaagttccatcagaggatgcttcatggtcattgttattgctgtgggtcactaaaaagtcagaaataggggacatggggaaaattctcccttccgagcatctgtccccaacagcagctggtaacaaagcccctggagctgaatgactgagctgccccacgctggaaaggaagttctaaaaataagcagttctataaccaattctgtaattaatgaatgaatggttgtcactgaaaatatgccatagtcagagttctggaaaacccaaggctgtacttaaaaccacagattgtttgaagttcttagacagaaacttacaggttcatcgcactcttttcttacacagataagaactagagatgaggaatatttggggctcaacccggtgcacataagaaattgatgtcagacacatattacataagcctggcagggaagagccacctatatatgggactctggtattaagcaaatggatccttcctatcaaatcaggtataggtatcctgtttgggaatataaacccagatgactgcagacctcttaaggcagccaactggttacaaagatttggtgcaagttgagtcaggactgagaagggaacaggaagagaaaatggagtaacaaaacccaccaggagagccacctgcttccctgggaggagcagtgttaagtggcgacctggggaactgggaacacggcatacagggaatcagctctatgggccaatagcattcccaggttctacaagctgcccaagctctcttccgtgaagaagggcccaggtgctcatctgttattgagcatgtttaaaaaggcatttaggaaagagcatcaggagacagatttgcagctacgacgtcagtccccagagggctgtgctggcttagagactgagcagggttcatgttagcaatgtgggaagagccaatgctggcaggtgtcctggtgctctctgagacacctgtgggcatagtctcctccagaagctcacccacaagtgagtgctgtgaagggtagcaatccacacagacagacctccctctgtctatgcactcagccaaacagctacagtgacgattctgactcttttggatgaaggttgagtgtgggataaaggaggcagtgattcaaatgacgacatgtcgtgggactgggaagacagttcaatctataagttgtttgtcttgcaagcatgggggtgcaaacttgatccctcaaatccatgagaaaagttgagcatagtggcacacagtcataacctcagcattggggaggtagagatagggggatcccggggctcatgggccagccagcttacctatatggcaagttctatgacagtaagagaccttatcttagaaacaggtgggtggtccctagggataaaattcctgagattgtcctctgagctccacatgtatgtatgtgtacatacatacacacctacatacagtacctaaagatatataaatacacacatgtataggtacacagagatgcacaaaattatgccataaataaatgtacaataagcaatagataacaaataagcaggtgtgacatgtattggtacataccactcatatttttgaaaagaaaaatggagactacagaactaaatcaataacttccagattttatgagactatgcctccatgtatcttttataaactatgcttccaatatgtaaagacaaaggcacaggcctggaatggtagaaatcaagatgcaagcagagactgtgcctggataacagagtccagagtgagcatcattttctccttcatgcttgagaatggatttcttctccatgcaatggactaacagtctttatgttttcaaagagtcctcaaaatctcatgggaaacatgaaaaaaaaaaccatactttttctcttttaggaatcttccccataaaagggtctgttaagtagtagtaagtccatctagctaaaaacagatttgaatattggctcagagaagaagccaggcatggtggagtatagctgtaaactcagaatgtgggaggctgaggcagagggatcttgggactctagaaaccaaggtctgcctggactgcctgataagactgtgactcggaaaaccaagaactagtcagcaagctagctcagtggtaaaggagcttgcggggaatcctgagttcgatccctgggacccacatagtagagagagagaactgagtcctgaaagttgtccagtgtactccacatgtgcattgtggcatgtgtgcctcacacacatatacaaacaatagataaatgtaataacaattaaaaatgataaagtcagcaggattgggagagatctccaagctagaagtccatgaataagaagatccattcaattgaagttgtcaattggaacgacctagtcctctgagagattacagaacaaagtccatagactgttttcaggaaaacacagacacaggcctggtgtcttagcaattgcattaagactcctaagatactccttcaaagaagttcaccttgagaaaaagaaaaacttgaatttgggtgaaaatacatgttcacttattccttaacctaacagagccctacacattccaagatttacccaagctgccaaggaactggacagcgttgcctgatctaactcttctggggacagacctggtgagacatgccatctgataacgcatgtgtgagcccccagtgaccttccttggcatcctctcctctcctccttaaagctgctggtcattgcacaaggctttcctcctaccccttgcaggacagtttctccctttcctctgacaattctaccatcttctcatgacctcaggcagagtctttagctcatacatgcccttgatcctctcttccctgggtctttacccatctacttactggcttttagttacttttacggagaacaaccccaaatctgcacttttgtggcatcttcccaacagaataataaatgtatataaatttatatttcttttttttcccttctcgacaatgactcagctttaagacacttaaaatagaatccatataatctcttcccttgcactgactcccgtctcatttggatccaagtgccccgtgctcatcctggcgtccagagctcgggctttgtctcttctgatatggtcctgattcgttctccctgatcctcgtctctgctccctatgcccagtgtttgtccatgggtcctagataacgagagtggtcatctcagtccctcaaagctagtagatacatactctaaataaaagccataattacatctggttttctcatgactccatagtttctgattgcttcttgagttttcatccaggctctctttgcctttaatggcctccagggccaatggttctttaaaggtcattctctagtctcttgtttgtacctaccattaggacaagtcagaaagcctattatcctatgaataaaaacacacttcaccttccattacctctggctgtaatagtactctctatccattgtgacctgcctcatgaagaccaatttaaaatcatagtctcaaatccttccacaattttaaaatcagaaatgtcattttattctctaaatccttttcatttattatctatgactttgtgaaattttcaccacaaaatgcattcgaagaaaacactttatttatttatttatttatttatttatttatttatttatttatttatttatttatttattttttggttttttgagacagggtttctctctgtagccctgactgtcctggaactcactctgtagaccaggctggccatgtacttagaaatctgcctgcctctgcctcccaagggctgggattaaaggcgtgtgcccggctacttttttttttaaatcatagttttcatgggccagaaatccaggtgcagcctggctggatccgcaggttggacgttgtaactaaacccacagtcagatttttgggcggcttggaaaatggcacctggcaggccccagatccttgttggctgttggtcagagaccagagctcttcctcatgtgagagagcttttctgcaacagtatggtgagctttcttcagatcaaggaatatgagacggagaaagagtaatccaagagaggagttcatcgtacaagttcatctcaaaagcagcagcacaccatctcttctggcttatcccatgcctgctactctaagctccgcccccatctcttctggcttatcccatgcctgcatctctaagctccgccaccatctcttctggcttatcccatgcctgcatctctaagctccgcccccatctcttctggcttatcccatgcctgcatctctaagctccgcccccatctcttctggcttatcccatgcctgtatctctaagctccgcccccatcccttctggcttatcccattcctgcatctccaagctccgcccccatctcttctggcttagcccatgcctgcatctctaagctacgcccccatctcttctggcttatcccattcctgcatctccaagctccgcccacacttggaagcaggctgagctagaactttggtaagagcaggggccatgtccagggagtatctcattgcagcatgctcctcatagtcttccctgcctcttgaccttcttatcccttctgctaagtgcacacagtccttgagagagagagagtgagctgtcacattcgccttgatttttctcttagcctctgatgcaggggtctctatgactgagtccttcacctatgtctgcggacttagactaaagctgactgcatgctgacagcacaggggggtaaaggccagactctcacagactgcagaaaagccagtcgggatggatttgtctgtgctctgaaatgtggctacatgatccttgtggttctctgaagaaccagttccactctgagatggaatgcttctaacttcaggagtaggatgtgggagaatctaaaatgccactttcctggaacagagagagactaggccctcccctcacatccttatttagaacttgcacaaatatacaagcaattaatgccattaccttcttcctttctatctggagcgctgaactaacacactctctctctctctctctctctctctctctctctctctctctctctctctctctctctctctctcccttcctcccttaatcgctgtcagttttttttttttcattttacatttaagatgtgacggcattttcctattctaaggggagtggggtttttgtttttatttatttttctgttgtttgtctgtttgtttttaattctacacttctttctcttactccccaccaacatacctttttgagccctccttactcttggttgaagccttctcctctgggcccactggtacttttggatcactccaaatcctcttgcaacgctttaaggtgttaaatggtggcatattgtttctatattttgttgcctgagaaatagaggggccttcacccagtgtctattgttttctaaggtgaaatgggagacttagtgtattacagactgaggtggttcagacttcgaagacatagcacagaagtctcagtcgccctctagagacctcaagatgaactgcagggaggcaccaaaaggccagataaactgggtaccccttaatcccagtgtgccctttcccaaggcacacattttagctcttaaacaaggaatgggtgctttctgaaatcttctctgttcttggagatgactctccagtgtctccaggggtggaaatggagaacgtgtagtgcagccaaaggagactgctctccttagctccagaagggcgatagtccgctgctgctgctgctctctctgatatttagaagattctgaaatccagaattctacagaaatctgaatccttaagtgctaggagccaatttaacctttagatgtcccatctttcctataggacacacagatcacatctatgatctaaaaacagacagagaacttcctgttttatatccatctgcaccacgtccctgtgtaaggtcacattgggatgctacagggtcaagtgaggacaagtaaaaaagtgacataattgccataattaacagtcaggaaagaaagccaaaagatgtcatgttcgcttatgacagcagattagagaggcaacttaccatacatagctcgtagtgaacaatgaacattcatgctttgttgggaaacgcaagcataaatattgaaatggttacaaaaattcatctcattctctatgggctagccacagcataacaacaaaaggagatcaaatattaacaccacattgctccgttccatgggtaggaatgtgcctgaagtctcggcacaacagctttataaaatttcagcagagggtctatcggcataattttaaaaaattaaatgtttacttgaagtcagtcatggtttaaactttccccaaataatgtttcacaattggtacacatacaagtagcaactttctctatgaataatcgcatttccaggaggccctttgaggctgggaccatatggctcagagccaccgcatcctggctcacggttcccagagcacttggtattatattcattcatttgctcatgtgttagctccctagccccgcccaccaggaaatgagctccctgaagccagggaaggggtcagttttgttcaaaactgccctcccctggtctctgccaatccctagaagagtgcttggtgcattcatcttctgtgggccacttagagtctcctagagccactgggacaggtcttaactctttcctgctgggctgatggctttcttctctcctttatgaaaggataaagatttggtcttcttttaaagcttaatggctgggagataaaatgagagtaggggacagaagcagcgcagcagcttaagtatctattaaacagatacttccccccgggaaaagaaatgtctgttataaaccatccctgggttttataggttaagcctcggatgaccggacttcatctctagagcttcctggtagaatctgagagttagcactccccagaggttccagggtggagccaaagctcatgcccagtcacactgtgggaatgttaatgtctgtgggccacaaaacactatgtacgtatcaggtgttgctgtaactcagtctccctcttcgccaacatttcctttatatgcaaccctgaatctggctttgtcttttatcattaaacaatgttctcctgtggaaggaattcctttatggttataagccggtctatccaccgcagatggaagaagccataaaggggagtcctttatgaccaaccacaaagttgtggtttattacaatgaaacaggatccaagtatatcaaagagcacaaggacacgctctgaggtttcataaataggtgtgcctccttatgtgcttcggctgctattgaaaggctactgagaggccacagaatgcttagtctaaacagtatttccaatactcccgtgactctgtgtagccctcggactgctggagacttgatctgccatgatcttgctactcattagtatttgaactgtgaaagtccatgagcaaaaagtcatatcaaacctaggtcctcaaaaatactagacaagtgatcaatccctcaactatatcctgtttcccagaagtcatctcagaatgacaggagaaaggatgctcattatcaatttgggggtttgtttgtttgtttgtttgtttgttttgagacagggtctcaagtaacctatgttggcatggaatgtgctacatacccaaggatgaccttggactgctgatcttctggcttctgcctctcaaatgtggagaatagagccacatgtcctcatggtggcttgttcagtcatcatcaagtacatgaacaatttcatttgctgcttcctagctttggtcttggttcaagaccaaattgaatttgttcttagtgtgtgtttctatgtgtataaggggtcattttcttcttttctagaatctgattcagttgtatcatttgtttaaactgtgttcaaatgcaatcatagtggacacatttatgataaaccttggtacatgacaggtactatattaagaatttcccatgaactaaaactcatttgatgcttacagcaacaatttaaaggaaggcactgttactctccccatttgatagatgaagaaactgaggtacaaaaaagatggaccagagagagatcccagggatattgagggaggttggttgtaattatcctggaatgtagtctgagtggagagaggtgagggctgggaaaggaaggcagagcgggccagctttgaatgttgtgacctggacactgcagtgagaagcagggccggcctagttctagttgctctcatgtgtatgtggtgttcctatgtgggcctgtgagtctgagtgtgaaggccagagatgaagcttggggatactctttcatgatttcccagcttagcttttgatattgggtctcccattaaacatggcccttgccaacttgccaacttagctagactctctggccaaagagctgtaggggttcacctgtccccactgatccacctacctacctagtgctggacacacacacaaagatgctaggaccatcctgttttgtgggtttcaggcatccaaattcagttccttctgatttgtgcaaccagcataacattttttgtgcactgagccacccactgcaacgcttttgcaatgtaggtgtaccaactatactgcttagagtttaagcattgaaatactgtcctccttaaaatgccatatatattaaaatttttcatatcatactgtaaatatgagctatgttatttgcttaaagtgaaagacagatatctaaatagataaatgattattgaaattaaaaattcccatccctgttaaattaactaatgtcgagcatctgaagcccacagctcaggaaataccgatatagcaatgatgaatcaccactgactgctgcttcttggtttctttcatctctatattttaacttaaccaacctggtttgatcgatagtgttttatttgagacttttaagccctttccccttagctggttgagttcataaaatatttggtatattgtgtttcatataaaaacaaagctgaattttaatgtcactgttttataggtcagctatttttaattatgttgcattctctctttttttctgtacatccaacagatgcttgatcaatggggctgtgtggttccaggaccatgaccatagtggggaacggattttcagtagcatttattcagaagatgatggttttctagaaattcccctacatcaggatgatgtggacagctgtccgatctgtttatgtaagtagcatggcttttgtcattcaaagacacgtgctttctgtcctttccagtttgaacagaatcaggtgtgtgtgtgtgtgtgtgtgtgtgtgtgtgtgtgtgtgtgtgtgtgtgtaggaacattcatatcataggatacttttggaggtcaaagaacaacttgtaggtattggttcctctccttccaacatgcaggtcttggagactgaactcaggtctgcagatttggcagcaagcacttcacccactgagccattttggcatcctagcgtcatttcctaacactttgttttaagagtcttaagtgatgaggcccacacattgtcacggtgtaaaccatcctctggtctacatagttggttccactgacatttctagactttgatgctgctagcatcttctaccctgttacacggattagtcagatacttggcatgaagggactaggtgataaactgatctctgccactgagcctgcatcactttgatagtgggttcatataccctaaagttctccatcaatgcaattgctaatcaagtgctgtatgcaaatacattagctgagttaatgggcatctaacgctccttaatcctaggcaaggatgctccagccttgtccccagttccttagagaaaatggattttttttgaaaacttttctataaagggaatgctgagttggctcaaatagcttccagaaattctacctaagaggttagctcctcctttgccagcaagaaccttttcctatgggatagaggaataatggaaaagaaagaacagattgtaggggaagccaaagaccatgacctcagaagatgtcctataccaagccctgagactagaaaatggaaaagggtgttcagaggaggtctgttggaaaccaggacgtgatgcgcctgggaagttcagcaggaggctggtcagctggcctctctgggtccattattctccctccagtgacttctgagatacaaagcctttcccatgttctacttcctctccacaatcagacttgccttctctgcatcccttggcacagactagcttccaatccgagccttcgcatttgtcggacgggcctgagaaggggaagttctgtagaccctgcagtgggtgttttgagcagctgcataaaatgctcagacgtacaacagagagtgcggacacacagaagggataaaagcgaacagctaaccatcaggaaacatcagaataaatgaaaacaacccataaataacaaacagaaaccattctggaagagaaagtaataaaatcatccggaattatttaagatctatggcttctgtgggagatttacagccatgatttttattaataactttcatttttgaagacaatttgttttcctttgttggccagtgcttaattagatctgcacagcacagactgctcagcggttagcatgttgagtgaagtcagagcctctctttctgaaggcacttttactctggtcctggccggctctcacaagcaggcatagacattgtggaaagaggctgagagaaaacagaaagatggcttgcatgcaccaatacaaatccatcatcactgtaggaaaaacgaaaggtgtgagatttcccggtgcagatcaatagaggtatgcttgcatatgaagggcaatcaggtatcatagctttaacgtcaaacttaacacttagtgaatgtcagtatgcctttaatatattcacagagtagcttgggcagtagaaaatacacaaaggtatgaaaagagtgctaagtacaccattgtaaaagtctcactgacctccgacatcagcttgggggtggaaaggtcagtcagctggcacccctagtggccaaataaagtttctctgtggaccaggcagtagaaatggcagaggaatggcatacacccagggacttcctggggtctggggaaggaggacttgaatttttcaaatctctaacactcaagaaaatgaaacaagtatgattagagcagaaagacacagaatacgggggccacccgcactgcccgggtgacgtcatcacccaaggaaagaaataagagcatggctgaaaggaagcctgttcaaatgaaaggtcaacaggaggaggtttctaaaggccccagcagatcagggcagccttccacggactgcgcatccaccgcagattactgaagtacagcaaaccaagcaattccttatttaataataagaaataaaaagagggtgggcaacctattttcaggaccctccctgttgcagagattttctttttctcggcttcttagtaaagccttggctgtttacccttcatcgaaagtgaccagctcttctcataattaaagcgatcgatggtctcaaatatgggccacctgtgactctgaaattatttctacatgaaaacacaaaaatgaatggcttgttgtaaaggaccttattgcagaagtttgacattcatacattgaattattaggcagttactgagtttcactggtttgaatataatttaataagaacaaacatgtctacagtctcttagtgagggagggaaaggggcagttgtttatttgtgtactattttctcagctatattgtatcttgtgttataacagatacattcattcaggtatacagaaagggatggctgggaaatatgaaacagctaactgttaattctttttatgtgtagatataggtaaatgtgatggcactgtcttctaaaatgtctaataacactaaatatctttaatatgtgaaaaaacaaatgttttttaatgaaaaaataaacttccctatcttctatattctctgatatcctctctccctcaacccctccactgggggtgggggttgggggagaaataagatgacctataaactagaagaaatagtcgagaggcctcatgggctgtctgcatgtgacactcgtggaataaacactgcagtagagttaaacaagatggttcatctgtctttggtttggggctacttccttctggctgagttctgcttttaccccattaacaagtccaggtttcagaagcacagtcaactaaggtcaccttgctttctagttcttttgttctatggtgatgacagcatctaaaaacatgtagcctttctggaatatttcattttagaaaaatcagttatgagggagttcaaaaccacaactcccaagcttccttggcaaattgggtgctaggtctggggttgagtctcacagtatgccttgcccttcttcctgatctgtttcatatttgtagggactgggccacacagtgctcctaatatacccagggttaatggcattcttccttctgcccaactcccccacccaccagttcacattatctttctcctcctctgctagagtttggttcccagtggcctttccctagaacctgagaaaagggaggagattagcatgatgctctagcactcaggaacacttgaatgtgaagattcccagtatccccaactcagaaaggcatacccaaatgtgtacaccctttgcacagccctttgggttaacttctgacataagcaaaagaagttggtgtgagttagttatcaatgaccttgcagcatcaacccaccgatggggcatatagatgggaagattgggctacagagacatggaatatcagaaaaagcacctttcttattgcaatgtatttggattgtgttgttgtttttaaagtcagccaccagcaaaactatgatatcgagctggtaggagaaagctttggctcatagaaaatattgaataacagtgtgtgggtaaaaaatggagggagaaagggaggaaaggggaatggagaagagaaaaggaacacaaagcaggagaagaaggaaggaaatggggaagggagggaagagaaaagagaggaggggaggagagagaagaggagaggaaaagatggaagggggtgtacaggaacagaagggaagataaatgaaggaaggctggaaggctcttaaaggcatagttcactcgttgctgtttaggtggaactgtgtacttcacagagaaataggggcttaaccatttctgaggtctttcaaagtcatctgtctgtgttgttaacagtttgggaactcaacccttctctctattaagaaattttctctgtagtcaacataaatcccttctgcttgatcttaagcccactctctctgggtctgtctcaggaggagaagaacagcggatctctgtgcttggcatgataattcttctttcatttgaagagagtaagccatcaccttgcagccttcccctgctccttaatgatctgaattcccattgcctttctccatagaccctgctttctaatcccttaatctaatgaagcatattaggactgagttcagagctggtaaaaatagcatgttgttgaatgcaggtaccagtagatccagaacaagcccgtctgacacaaggagctctgtgccactcctccacccacctctgtggagcctgggacaaacacagacagacctttgtggctgagagatggactaaggtttaagcacctgtactcaagcagtcaccgagtgtttactggccagtcggtggcacttcatattattctgggcacacaagtgcaatgaagatgaaaacatatatggatcctgtgtccatgagcagtctgccagtttgatcgtgggtgtgtgagagagacttttagatcgtgtcagtcagaaattcttatgtaacatcttcctctatcacagtatcagttgatggatcatggtggatgggggccatcactgctcaggtgctaggatcacagtgcacacacacacacacacacacacacacacacacacacacacacacacacacacacacagatccagtgctgtctactgtgtgtacagctactagaggcagcaacttctcctgcctcttttagtcatgttaggctctaatacctgcagcacattcagccttactgtgctgttgccatcgctattataggtattgtggggggcaatcctctcacatttgggatcccttcttccctctcactgacccctccaccatgaatccataagcattgctgtgggccgagcaccaagtgctaggctatgcaccccaactctagcactttcttcacaaggagatctggctgtgacttctcagtgtcccaaactatagatgacaatggattcttggcatcccccaaatggtacacactaaggatgccctactctacaatgggaggggatctttttcaggtaaagtcacaaaagagggagtggagttataaaacatatctctggtgtctgtgtggagacagcccacagagatttaagttttgtattgcctctttctgttctgacccggactgtcccttggaggtctgtttacatcttccagcctgaatatgcaccatcatcatttcttaaagtcattactcagaacaaccccccacgctgcatttcatttttattatccccgttttaggaacgattaaatggaagcagatagcagttgcaatgaagcaaatcatgagaggctctgataaagacagcagcctgagcaggctcaactgctactctgtgccaggctattcttaatgcatgtttatgcagctgtcccccacttccaggcttttataaatgagccatcctgtgcccaattatcattatttttaccattccctgcccttctgactccccatgccatgtgtacgtgtatgtgtctatgtgtatttatatgcaggatataggtgtttgctttgttttagagaggtcttgctatgtagtctaaactggcttcaaatccataatcccgctgcttcagccacctgagtactgggattacaggtttgtgcaaccacacccagctgatattccttttaaaatgtcccactccacattccttaatggcagagaggttttactggctttctgtaaataggattctgttccagagatctctgccgttcaacccccattcctcttacccactatttacaaaagacctcattaaaggttcctaggaacaaattcaatttcttttttttttccttaaagcaggttgagtcaatacatcaaaggcatatctgtttggaatattttcagagcaatacattagaaattatgacaatgcctgctctggggagggttccagaatttcagaaaaattgtggccctagagaacagtgcagagatgggaggagtttctttttattggattaccaattgacataacttttgaccacagcaaacatatccccaagaagttacccaagaaggttggtgactaccgatcgactttgttgaattctgattgtgtcccagtcactattagctggtgtttgactgtaaagtctcatttgatatttacaatggatttgtttaaaaacctatttcactaaagggaaatagactggggtaataccagctacttctcttggcttctccagctgataaatgacattgtggagaatgggatgtagctctttctgacttctgaaaccataaactaggttgtgttgacctcaagtctttccaacggagccaaatttataagcagctgtaggattagttttaaaaaccaaaaggaatgttgtgaaagccatcacatggctcacacccacagcgtcatgaatcttcctccagctccttgggaaagctgctgacaggcccctctgttggatcctgaactggctggatactccctggtctttctcaggcacggcagcactcatttcaaagagaggagatgccatctctcatgatatcttctgaaaaccattctgtctaaagggaggacgaggtgtgtatgtgtgtgtgtgtgtgtgtgtgtgtgtgtgtgtgtgtgtgtgtgtgtgtgtgttcacgcctacatgcacaggccagatagaagtgaaaaggctggcccatggctttttcaggtgtatgtattcttcatttatttaacagtgatctctgcatgctcactttgagccaggcactccccataagggttacaattgtaggcgtgaatgaggtccttgtctccataaaacatccatcctgttgtgacgagataagccacaaggaatcaagtgaagaagtagaatcctggataaaaaagtgtcctgagagtaaattaaattggactgttgtgacagagcagatgggtgactactttagcacaggtcgctgagggaaagtctgtctgcggacactttatttacctacattaccggaacaagaatgacaccatgcccttcacctactgtgcttccaaatatcccaggcttctctttatttacagtgtgaatctgtaatccagagctgtaaagggtctagactggggggattagttttgactttaaatgctatcattttaaaaatgaagaaaggcaccaagaagagcaaactacttaatcaggctatagaattagtgggtgatctggctacgagatgttggcccttctttcaaggacccaagtggcccctacccccctgctaatttttgtagtatcaagctttccctgtagaatgcttaccatcatgcctactggtcacgagtgaacagattctaagttctcatgaaccccaagggacctggtgaatggacactaggaaccttggaaatgatatcctggaggctgtggcaacaatgagaaagaacatcaactcatccatcacacctagccatactctggggctgaggctgctccggccactccttttggcctatgagcaaccagagcttctggatttggggatgggcaatgcctagcccagtaaattcaagtatcactaagcacctttcctcagtgatgctctctcctttaaccaatttgatatgcaaatgttttagtctatgatctccaccccgccccacctgcctgacaaaaagattagcctcagaatttctttaaatagtgagttcctttggtgcatttaaagtgtgatccataaaaactcaatctatgtaaggattttattcttccctttaaaaagaaaacagccattatatcaagggcactagcataaacttggactcttaatgatggatttttggactctcttattatgtaatggttcccattcattccacaaatatttattgagctgctttatgcaatgcacacatccagattgctatgaggacacagggacagaaaggatggcacagcctctgcccgctgggggtgtgcaggcacacagtcctaactcaaggcagctatgatgaggctgtgacagaggtatgaaccaaagttgcagggcacatggtgtaagacagtatgccacaataacagatgcaagcaggggaaacaacatcctaattggacttcaaagaaggctcataacttgtataattctatgactcgttcatgcccagaaaaggaaactaggtatattatgcaggaagtaggattcaccaggcacattctcagaaccgaaggagccaagggtagacaatgataaggaaaagatgataaatattggaaggtgaaccagagccttgaatgcaagaacagataaaatgtagacttggtccataaaccctagcaaactctggtgtttgggccagagatgaatacagagttgtattttaggaagctcattccagcagccacatgtagggctgatctgaatgggaaaaggctggtttcatgacaaagaagtccattcacttaaagtctacatatagaagatggaacaatggttgaactgatgctacaaatggtctaacccccggagggaagaattagttgtagaaaaaggtgagtgtcccaggcctcagagatggggccaaggcagcagagctcagcaggcttctaagtagtgacttttaaaggacagttctaagatgctaactgaaacagttatgatgatcctagctggacagcacattatccatgcatgaagtctcagtcattaataactcctctcctggaaataggcagaaatgcatggtaaaaaatgggagggacgagaacacttcagaaattatggcatctcaacagaaacagtgaaaagtcggttgagtaggatagagagcaggagcccagggttcaactcattctgatcaaatgagaactcagtcgtgggaaatagctttaaccatcaggtatcatttagatcttttagctctgatgatgtcacaataacatgatgggctggggcctttcaatattaagaattgggccttgagtcccacaagtgttcagttcacaggtggatattcatataacttagctgtctgaggttctgcgacaaccctgtgagttttggagagttcatctctggctgcttggtcttaaagagagtcgaatgttacattatgaatactgaatctaccccaaagtacacacaccaaaggcttacatgttagcctgtggcatgattgggaaatggtggaacctttaggatatgaggtctagggagaagaagttaggtcactgggaaggtgccttcgaaagtatactggggtcatggtattttctgttttccagatatcacgaggtaagtaggtcttctctgcatcatgtcccattgttatctttgtcttactatagatgagtgtttctcaaccttcctaatgctgtgaccccttaatagagtttctcatgtggtggcccccaactataccatcatttccactcttacttcataacttcagtttgctacctttatgaatcataatgtaaatatctgatatgcaggatatctgccatgaaatatgaaccataatgtaaatgtctgatatgcaggatatctgccatgaaatatgaaccataatgtaaatgtctgatatgcaggatatctgccatgaaatatgaaccataatgtaaatgtctgatatgcaggatatctgccatgaaatatgaaccataatgtaaatgtctgatatgcaggatatctgccatgcaaccctgttgaaagaatcattcaacctccaaaggggttgcagcccgtaggttgggaacctctgccagagacccagatctacaggcttacatgaccatggagtatatatccataaactaaaaccaatcttttctttatgaaagtgggtgtgactcattattttatcacagttatagaatactgatgaacatacttggtttctactctctttagaaccacacggacatcatgaaatctattctcagccaactgacccatagcaaccaaggacatagtcttaaaccagttactcagtgttattttcacggaataatattattatgaactgagtggtctcatgataagaatattttgggaaaagtcatattacataaagttaaagatgcctctttgttctaaaaacacatctgaacttttcaactgttaatacatcctgaaattgctctggcctgaacagcagtaagcagcatctctcagtcttatttattttattttcagaaccacttgtcagagtgtttcaagagacaaatgctagcaggatgcacctccaaaaaatacccagtgattactctcgggtatttaacctgggatctagaatcatagctaaagacaatgattactgagtgctcactgtatgtcaggtattgctccaaatattttaaagatgccaatatattaattctcattttataggtaaagaaactgagatactgagtagctaagagactaccccgtttgctcccatgtcctaaatagacaagtaggtaagcaggggtgacaacagaaattgatgtctaaaggtagaatttcaaacgctatggtcaattagtagcagaacagattccaagtagagccctgtgtaccaaattccagtcacagcaaaccttgtcagcacttctgcttgtgtgcttggcttattggcttcctccagcaccatgcaatagaagctctaaccggtactgcctagttagattcctcaggaaatgtgttggtttgcatacatatcatctcccattacagcagacatgagttatacaaccagcgatggatagcaatcagaacataaagaaaaacaactcgtggttagcccaagtagcaagagactgaaaatgaatgcttgcttgaggtctagcttctcctggcctctcagagttccagtatcttgctcctgatgcctagataaccaagaggctgcttttctttaaggcaatgggaaattgtgtactcctgctgctagggtgggatccaacacctgcctgtctacttagctcaaggattgccaaagtcatgtcctaccctctcccacttcctctccttgttcagaaggattatcaccagcttcggatgcatctggtagccatcttcactgaaggacaggtttctcccttcaaaagtgacgttgatcagatacctgtaacgataaaattaaaggaagattaaaagtatgaaaaaggacttgaaagcagagggcactcaggttgacaaaaagatgaaccagtagataggaacacagatgaccattagtcaactgacactcttcaaattcctatttattatataatacccatgtatattttacagtaggaatcatgtggaaaaataatacaatttaaaataaggctggctcattaccaaataattgagaaaattattttaatttaaattatatgtgtacatatttgtctgtgttggggtatatgtacatgagtgcgggtgcctgcagaggccagaaggaggcactgggtccccttaagctgtagttacagatggtttgtgagctacccaaaataggttctaggaaccaaactcaggtcttctctgagggcagcacacactctcacctgctgagtcatctctccagccctcacttagagacttttaagactgtttcctcttccccccatctgcaaaaagtctggtaataaaaagatcacctaattaagtctgtaagcttaaatgagacaactaggttaagcacttaccatagggcctggcgcatagtaagtgctcattaagtgttaacaatcattattcaaaaaaggaggcggaataaaggggtggaggagctagagacaagaaaagaaaatggctatgtatcaagacaactttctgccaagaaaggtagcaagtaggcacttagggtctgtctccacccccaactatgcacattctttaaattcttactaaggtcttgctcagcccttatttgtaagtcaagtgagcatggcagggcagaagcatgtagaacccaggacttctgctggatgcactgtaagtgtggggaaacgaggtgtgtgtgtttcatactgtgctttggggatgaaagcataaattagtgaaaattctggaagccaccaatatcagaccaatagaatggttttcctgcaggacacttatccccagcctatcctgtccattgctagctgctagaactaagaagcagctgggaattcccataggcctggtcattacaagtgcattagtgcaactgggctgatagtaattaatgtccctctaccatataggcccacagaatcgataatgaagttctgtgctacatgatatgctactccagcattttaggactgatgctgtttgtgagttgagtctctgcgaaggaaccaactaggcacctcacaaagcagtggaagaggccagttcagaggacctacttctaactgctcttcttgagaacatctgggaaagttgcctgacgcaggcaaagctatagaaatgtagaaccttctagcaactgtagagatgtctgtgcatcataaccgcccagcccccagggatactttttattctagggctctgtgggagtggcaagcttgtcatgactctatcatatgcagctttagaggtacagctgtgagcacggaagactccaaaagaacagaagttcttagaatttcaagctagacgtttcaggccagctagcttgtttcttacaattgatgctttctttatacagaatcattggctttgacctctaggcttcttttgaatattcctatctgttgaggtactcaccatggtgtcttccatcctcaacacaccatcatctcatgattctgtcttatttaaagctgattcccacccctttacaactcttgaaaacttgtttcttcttatgatattgtatggtcttagtctagtccttctttgatctgagcattcttcaagtatttgaagacatgtatcaaacatcctttataaaaattcatttcaacctgtgaagacaccttaagctcacttgcttctataattttaattttgtggattaggaaagaaaacattaaattatttgctcaatattatcttactagtttttatcagaagtaatagttaagtaacatattaagttccatggcctttcttccacaccatccctgttctcacaacaacataggatttaggatcccatttccttacatgatcatcgtataccatggcctcaagttcctcctcattttgagagccttaaatcagtcaagtgtggcatccacgatccagctcaggtcccacacagtatcttcttcattccttactctgatcctcacctcttagctcagtcggtgcagcatccccattgctgctttgaagataatattcaggtttcctgtagctggcactaattccaaatacaacccaaatccctacagtattcagtcttagggatataattacaaaaccagcattttaaatggacaaactacagtagaagcatccaccatcatgaacctgaaaaatatgttcttcctataatagtactgagctacttggaattatttctggacatctttagagaaagattatacaacaaaaaaagtttaatcccattttgtttttaaagaaggaaagatgagagagaggaacaaaagagaggaaaataaggaagagaaagaggaaagacagaatggaggaaggaggagggggaagggaggaactaaattaccagcttaagtacccacctcttcaccaggcatggctataaattattctgcctttatctaaactactcttaaaatatttaaaaggaagtgtccatttctgaaggcaattacagaagttccagaaatgattaaatttctacgtaacatgaatggggttggtatatagcctcacgatgacatctctgaaggggatagcattgagctgcgagtccatgtgcagaaatttaaattttcaggaaataaagcccacttgaaggcactgcaactggcctgcagtggaacatctctcttcccgcgtctccacgtcctgatttcatgcagaaaccattgccttgcaaatacgttctttctcttccttttctctgtgttcatcccatctatctaagctcttcttggatgcttcacacttatcaagaccatttataaagcttcatgacactctacaaagtactctactatgtgtgttttaatcatctgggtcattccacagcatatggatcaatcatgcacagtgtgtgtgtgtgtgtgttttctttctgaggaattgcctgtgctgtgacaccatttagctattgggacatttgaaaacttaaacatgctctgagtgaggatggcttttgtacagcagagcccatcagtccactcggtggtaataaagggtggaaatgattatggctaaggtcgcgtctcaacttgtgaacctaaatgatacctcgttaaaatgaaaatgtcattggaccttcagctatcagagaaaacagctgtggtcatgaacaaatgaaatcgtcaataggaacactgtataaaatgtggtttatatatgaggttatacaatagcaagcattttaaaaaatggtcattatcatgatctgaccatataacagcaagacacctgcttcagtgaaggagattctgataggacatctagcgaggcctgctcataaatgagctacacagaaagaatgaaggctgacgttcatatctggaggtaacatgaagtcgtaagatcacatggatgattaaacttcccatgagaactgaaaatactcaatatctgactatactttatcaatttaagacattaagaccttgaaacctaagtcctgggtaagaagctgaactatagttaagactccgagaccccataagcactggtttctctatacaagccattatctcacacacagaaaagaccctggcttaagtggaagcccaatgcagagtgttgcccattcattacactctttgtctctcagaagtcccatcaaggttggataggttaaaattttacttgatttgtttctcagatgtggtttcacatccaagaaacccagtggcctacctccttaagttgtgggatcacaccgaatgtgagcttgctgcaactcagagaacagcagaaaactgtttgctggaaacttattttagagaggaaacagatcccgagatgctaattgatctcccccagtgacactcacactcaggatcagagatcagaccttctgttctgagttctatatcttctcatgacactctgaagtgacatcagtgtccaaagcctcatcagcgcctgtcatggtgccttatatcacctcaactggagactaaatgaactaaaacaaatgtcccttcctgcttaccttcttgttgaacaagaaactcagaatcttgacgggcttccagctaacacatttgttttacatagcctaagtcacacaccggaaggtttaatagggtcaagctaaggttggcaaatcctaggccatttttactttgaccacatagagcatccacagcaccatgtagacaactggcatcgtgagtctgcggtgtgtgctgggcaggaggcacctgatggacttctgccagcatttgtcagcaaatcaagagccctggcgtgatggcatctttctgtcttcatattgttacaaagcattagctttataaaaagtaatatccactaacatggtggcaaagtgaagtagctcaccatcatggctcatccagtcctctctctcgccgtcatccagaggtttctatggctttaaccagatcacaccacagggatagaaacagcatccagatgtcctcaaccccagcccaaattccttccaatcaccaccatgtttcaaaagtggagccaaagctcttccctcctttcctcacactgattgctctctactggatcagacgaaggcagcttcgggtccaccatcttacccggaagtttggaatctgtctatttggtagatgacggaaataaaggtatcagacacaaaaggtatattcatgatacacagttacacaggaattttcagagacagaaacttgtaagcgagaggtcaagaattcattctcctgcaggatgagctagaaaatagaaatgttttgaaaatctggctctacttttgaaaaagctgagaaaaggcaggccatgcaccaagaagtacacacaggcctccagccggggcttccctggaagctggagagaagcagaatcctcatcaaaaaggtctccctgcagcctgtgtgcagggagccatggtgctgccctcaagagtaacccgcagccctcacaagccacagacccggcagtgagtttcggtaagacactgattggaccagggcagcggaggtaccatcctgagagtggcccactgttaaaactgggatactctaagggtttgagaatagatgctgagagggaattgtggagagtgaaaagagaatgattggagcatgaatctgaacaatgtatagtgggaattacataccaaatgccatgatgaaaccgattacttatatgcaatttcaaaaacaattaataaaaaatagattggttaaagccatcttagagcttgaatgatgtgggtaataacagctatactatattgacatgttctctggggcattttattctttctttctttcaaattaaccttctttaaattaatatgcttaaggtatacaatattatgttataggacatatgtagttaacagattatacaggagagcaattaatctacccctcatttcttctgataaacactgagtctgcttgattactgatatctgattggcgaagccacaaggctttctaaacctcttcctaaagagtagaaggtgctgttggaaatgactgtttcttctacaaatttaccctggaaatagtggaaacaatttctcacaagaacataaacatagattttaaaaccttttaaagccatttcattaaaaatagtattgaaggagagaggccaaagtatttgtaaattagctttttatacctgttaacattatcctttggataaacttaataggaatgtcttactttttcctaaattaggaactcgtttatcaaaacggatcctgaactatcaagtcagtgtagtgggtttgttttggtaggctgttgctggtgaatttttgtcaagccctatgggagaagtttacaagcaaggccccccctctcaggagccctgcttagttcttggattcatctgaccttaagctgtgtggtaacatttccaagagggataaattatttcatctagtcaatgttttttatttgtttgtttgtcttgctttgcttttgaaagaggactttgaagaaacttttaaaatccccctgaagctatagtgccatatatagcaatatgaagccatgcaccagacaaaataattagaaaattagttttgtaagctttttctcttatttaggaaaaataatagctagtagagaacattgagagaaactaatttaaaggttacaccacaatatccatttataattacttgaggcacattaaatatagtttgccttctaataaattaaacatttttatctttctgaaatggtatttaatatcattaatttctttcacggaacattcacaaacaacaataagttcaagtgtggcctagtccatatataaattatttaaattctatttgtgatgttaaattaatgagagagattttaaggcaccctgagagctggctgctagaaccccgccacgctcctctcctctgctagaggtaagaaatatacttaatccttttgggagtttgggatgaactactttcatttgagggacaaatggtgacatcaatcacaattttactacaaagaagaaggaaaaaattctcttcagactccaaagtccaacaatgaaaaatcctgagagctttcgcatggaccctgtttcacaactgaatgtcatgacttagttttatctgaaatgaaagaaaatagaagagaattgttgagactttcccagtaatctctgcttggaccgaggaggagggcagagagcatttattttcctccagaaagctgttatttatggacagtcatcaaatcaatgagatttgtgtacaggtgctacaaacgtacaatagaatcctattcgcctcaaaagaaaaatgaaatcatggagttgtggctctgccacaagctgtgatggctgctgaaatcctcaccgttctaccaagtgggtcaatgtggctgtccatgccagggggcaattctctcctgagcttgtttagagttctctctgggatcaacacagagtcttgttttcagtggtaagaaatataagcaaatgaaaaggcctgtcctgtgtccccagatgctgctggggagagatgagtagaaataaaataaaagcaggaaacaaaagcaattaagagaaaagagaaagtttgtagagatactatctatctctctctctctgtgtctctctctgtctctctgtctctccctctctctccctctctccctctctctctctctctctctctctctctctctctctctctctctctctctctctctcacacacacacacacacacacacacacacacacacacacacacacagacacacacacacacaaagtccaataagtaatgttatggcattggggtggatgtagggtatattcttcaattacccatcatctcatttttttgagttatcatctctcactgaaccagaaagttgagggtgtggtcaggctggctggctcaagagctcagcctgtccaagtctctccagtgcaggtattacaggcactcatctccacacctgacttgtgtgtgactggcatcctatttattcagtcagccatctctcaggcttcgattgttcccttttttaaagattaaagattgtcatcttcttctatgcttgtgtttgtgagcatgagtgtatgtgtggtccacatgcatgcaggtgcctacaggggtcagaggagggaacagaatcctccggaactggagttaggagtcacgtgacgtgggtgctggaaacaggtccactgcaaaagcagcaagtggtttgaacctctgtgccatctttccagcctcactactgttctctttcaaaaacactatttagaagttggaaacttttagcatttgggggactagatcacagcctccccttcacatttactgctgatcatactgaggtctggagaactgctgctgagctttggccaattaagttcagagtctcccaattccccaacttttcctttgctcttaatactacagtcggagcgtctctcattgctccagcagcccaagctgaggctagagaacatttgcttctcgctgttgtggtttagtgaatccctgggagggtttctgcagttggaaatcacttaaccagactcctgtaatatgatgtttccttcccagagaacacaaaagataagcttacatcccataatttcagtccacagtaaatgactattcaaaatgacccctattctgatctcctagagttctgcctgaacactatgtaatccttaaagtctcttcaggaaagacatactcctacttggatatgaaagtatggtacttcctatggggaggcaacgaagccatcctttgacactaattaatgagcaatgcggcaaacccgcttccaattcaattttgcgtggaaaaccagaaagagaaaagaaatgacttttcacttcaccactcttagtcaccttggctatttggagaactgataaggtcctgctaaggtaatcacaacagtgggacttcccagtgacaggcaccaagagatgctttgataacaggaagatcgcagaattgtttttgctttctagctcattttcacatggcatccatgagttcaaaatattgagtataagttgttttctttaccaccttactatattgaatacatccaggatatactgtcctcactaagcctcaggacttattcagggagaaatgttaaaagtcaaaagctagctagcccctcacttattgctgttacctctttatgtatactgccctggttggtttgtgtcaacttgacacaagctcaagtcatctgagaagcggtaactcagttgagaaaatgcctccatcagcatgcttgtaggcaagtgtgtagggcatattcttgactaatgatcgatatgggagggcccaacccactgagggtggtgctactcctggtcctgtgctgtataaggaagcagaccaggcaagctatggggagcaagccagtaagcagcacttctctgtggtttctgtttcagttcctgcctccaggatccagctttgagttcctgccctgactcccctccatgatggatggtaggcagcaagctgaaataagccatttcctccaagattgcttctggttatagcatttatcacatcaatagaaaatatctagggtgcctactatgacttttaaggcaaaggcttgtctttctgatatccatttttttttttttgcttatgaaacagtatttagggaaaatgtcaaaactaaacaagcaccaattgacaaagatttctctagaacattcaactttaaccagaaaacacttctttcctgtgaccttccagttaggttgaaagaaacccttgatgtataatcccttgaccgaggacctgaaggaccctgggatgagaccctgggaagaggatgatgaggcttttctcatcttgaccttggtttgttcttccctcttcaggatcctctccctgtctatcaccttaaaggatcaataagacaagcacactggaagaagcacatgtagtccccattctccgggcagctaccacaagtttaactttgcctattatttagctctactaaagcaaaggacaaaaggagtgaatgaatttaggatgaatcagtgacagcttccgtcaccagggatgggaacagagattatgaagagttgtcactcatggaaaatgaggctgtaatttagtcttctagcgatagttgacagatttctaccagtggggcttcccagaagtcattatgctgtatggggaggggaaggggaccaaaggagtcagggtgattgcaatggtcagagatggtttggagtagacagggaaagaagatgtcgctgagactattatgactttaagggatgtgggtattctataatcctatcatgctgcaggtgcaagaaacatggttgtggaagatgctgacttgtttaagagcacatctctgttttagaaaacccagctgctgaggatgttgctccttagtaaagtactcgtctaggatgcacaagaggctatgagtttgagtgctggtacaggttcatgagaggctgtggagaggacttatctacaaaccatatctgccatgtggatgaaactctcccacacggaggaaaacgtaataacttgttgagtgtaggacttaagaaaagacatgaataatgagggaggcaaaatggaacacaagatgctgatggagacagtaaaaaggttgtgctaaacctacatgcgaagaagaggatgcagagtgtaaaatgggatgggagtgaagagggtaagcagcctgaaggtcagcaggaaacgtcagtgtggggttggttcatgttgcttctgtcatgagcctagcgaatggctctctggataacagattagtgagaggagacgttcctaaagtaggattggagtcaagagctgaggagtttagcatgtttgtcctgggtggatctgaaaacagtaagaatcaaggatggtattcctctttgtaatgcttgatgagaaggccttggttaacattgtttagcctgtctgtctgggcttgtgagatagcaagtaaagggacctgctctcaaccctcatggcccaagtttgagttcagggacccatgtgggagaaggaacaaacccactcaacttgtcttctgacctgtgttatgcagccacataacacacacacacacacacacacacacacacacacacacacacacacacacacacacacacatgcgcgcatgcacacacacactctcatacacacacacattaaaagaaataaaatgtaatataaaaatttaacattgtccgccaaatctaaatcttagttgttcagagcttgtaaaaacgtagctttcaaccccagcacaccgtgacagtgagcagactggaatggagaaggaaaaaggggtggggtgcaaactgacctgtttacttatttacttactgagttaaagacatctgttaataactagtcaaccagtctaacacgggttggcctctgattcagagcttcagacaaaatgaggacaagaatttatgtgaaccaaaccagcccccccatccccccgccgcgcctgcctaagaggacagcaccgtgaaccccaactgcatctccccggggtagatgagagaaccgtgtaatcatctctgttgctgtactgtgtgggggctagaactctgctgttccttctttgtcaggggatctcagttctctctctccctctgtaggttgatgtttccatggaaacctgctctttaatgcttctgaaattactgtgcatttataccattaactctttgtttactggggcagtttgcaaagtgatattccaacccctctcaaaggtaattatatggacatctctacttactgaaaactttttgcaaagataatagacacctgttgcctgcctctcaacatcaaaccctactcctcaaccccttctgtcttggctcttgcctctgctggctagtctaccaatatatttcacgaagtcactgatcatcaaaacaaggtctaggaaattagatgagagcagtgttgctctgtccttctgttccttgctcaccttctcctgcttgatgctggtgagaatttcccccgtagacatttgctttgcatatttgctgcttaaagtaaaatattatcttggttttctttttatacctcaggccagacttccctccttttacgtccctttcttattgaaactctctgttttgagagtacccaagtctcaatgtcgaacctacaactctccctctggctcactcaagacacagccgctcactcatcacctccgcacaccaagagttcggcatctattccagatctcacctctgccctgaaataagctccgtatgtctgctcagccaagtgcaacacatgccttgagattaattcgagcttaacaggaccagctccaaggccagcttcccctgtcatttcgtgatggaagcaatgtaagactccaatccttaaagggttccaaatcttggtataatttgatatctctttctgtttcaactcctttttcaccacgtgaatggaaaggaggacagattggctcttcttaggagctgtgttcctagaaccaataaactcagtgaaaacgcagcaatactccagcattgggtaccgaatttgctgattgacaccttcttcttttttcaacatacagcttcagaattctgtctccctgaggtaaattaatctcctagctttctaacacataagtaaaaatgcttggaagtcatatttcagctctggctgggcaataaaagaaagcccaacaatgaatgctatcatttattgaacacatgccaagctctgttctgggtgttttatgttattttaaattctcacagcaatgctataaaataatagcatatattatatgtgattatgtaatagctatgttataatgaagcctgaggttgttggcagcagggattgaatccatccactttttagtaatccccaagctcatgttccttttcacatagcctcacactgagcataatgctgtcaacagaaaccatggttagaagagaaggacacaaagaatccagagacttctaccgtggtggagccaacagcccaagcacggacctcagtgccttcccctcgggattttaaccagtcatgctctcctcgaccccagggatgactggagtcatggatggtcaggacatatagaatagaaagagagccctgctctctaggggctgtcaatctgccacctgtcacacacacaaacccctcagaagtgaagaaatggaattcatttgccttataagacatcaggggacaaagcacaaagcggtaagcttgactggacttataggggaattaattttcagcccgtgctctgggaggcagtcagttatgaaggctggggccacattctcagagcatttgttagaggctgggcaacaatagctagggtatttatctggctccattaagattggaagtttatcttggtttggcacagaatgtccaagttctcacagggtttcaaaagtatgatattaaagtcattctgggagctataataaaatctcatttactctcaatgggggaggcaggcccacactttgggtctggacagtcagatccacggatcacaaggtagacatattctgcagcgtcgcttcctgtctaaatgctctcctacaactgtgacctgctctccttcttcagctgtgactcagtttcccttacctcctttgctgtctgcacccctggcccctccctccctggcctagactccacttaaatccaggctggtgaactttggtttgcttgagagatctcgttccccttccttctttgtcagtcagcacaggctgatgcaccctgggagctcttcttagacgccatatcttcagtctgactgacttgcagtcctattcggctcatctttatttttccttccgtttccatgtatgtacacatgtagacatgtttgccttgggtggtcacacatgtatgtaggtaaatgtgtacattcgtggcttgtgtatgtggcggcctaaggatgagaagtatccactatcttctactttgtataccgaggaagggtctctcaggcaaaacttgctgatatggttaatcttgctggctgacttgctctgggggatctcccaaatctgtcatctcaggttggaattacagaatggccatcacacctccccaacatttataacatatatgtgggccatggggatctgaactccataagtgtgcagtctccattagtgtgtatcaaatgctttaatcttgagccctcgccctagccctatgcctccggtctgaacctcatctcgtcgtctattttcaccccctcagctgagatcactagccttccctccattacaaactcacagtgcctgagatgaagctgagagaccactccctcaaaagagccaactgcctgattactctttctcaaagttattgaatacttacgaagcacttggacaatagtaggcaccctgtagatgctagcttgtctgactccttcagtcctgagacttgccaggtgtctccatcctcactcatcacttgacactcctgctcttgtcccaaatgctggaattacaagcccaccagcccttacaagaagcccctgcatgagtcccctccttccttcttttgtgctatggagccttatcgtttcctatgcagatctctcaaacagcctgtctctgagacctctgtcttacatcctcaagatccttaagtgcatccctactatagactccatattgctgtgtcagccattgcttccaaaactccaatggcttcctactagctggagtaagagctgaacttgactcagggccctccctccacaccttgacccccatctgcacagctggacttctctcccgttctccagatgagccattgctaaagtcaagtggcttctttgctgtcttggaacagatgcatttgtctgcttctctactgttcactttcatatgaatgcaatttgaatattgctcctgcttaatagccccgctaagctcttacccaccttctctcactttcttgcccatgcaggcctcctcccttctcccctccctctgtcctctagcttgtggactacatttcagtagttcatgtactgttcctacagcccattttattcctgttggctatttaacttttcatgcccgtgacttgaattctgtgacagacaatgcactatttaaagagtcaaatctcatcctattatcctcttgcagaatctaaattagttcctttctggtgctaagtgttcaataaacacctatcgattcgttagaacttctagaagactagcttggaaagtggctctcactactttctggcttttccatgcatacacacacacacacacacacacacacacacacacacacacacgcacatacgcacacacacaatgcacatacatgcacatacgtgcacacacgtacacaatcaatacacatacacacacagagggagagggaaagggagaatgtttctttgggggaaagtgactcaattattgattttagggaaaaaaaatgaagtatcaaaaactggtttctaaaagcagtgagagaaaatgtaggttgacctcattcttgtgcaggtccctgtaaaatgtctccttttttgttttccacattaaatcatccctaaagtcagctttaccttttggatcacgtgacctgcttgccctcctgtcctctcacggccctgagaaagcagacataggtaagtaaacacattggagagccatgggaagagaatggcgagccctggttgtttctgagcagttttgttatagaagaaagaaaacgatatcgggctgtgtcttgttgatcatctaaggtgactgcctagtgggttgctttgagtttagaaaattgaggcacctggaacatacgtaaaaggtaattctgggattgtttttactaatgtgaattcttttatcagtttaggaaagaaagaaatataactcattttgcttatgacattacagatgagagagcttttttttaaggaaggggatgagggaaaggtatgtttatatatttatttcctagtgtctttctaattatcgagaaaaagaaaaacatctttggtatacataggagaaactattaaattttcacctggttaggtacacatacttacaaagtctttccctcagctcttctcattatctgccagttacaagagtcatgggagggggaggttagcagtcaatagtcacatgacgattttcttcatgtgtggaccaactcctgacaatgcagcatgctggcatctacagcgatgcctaaggcttaatgcaaataatgggcaaaatggatatttcatgggcaggcaactgggagcgaaggcatctcagagctatctgcagagcagagatgcgaaggagctcaggtggaaaccagcaggtattgctactaagtctctctccacctggtaaagacctaatctccgggaaagtagagggatgttaatttgattaacacttgcctgaattccctcagcctcccaggcaaccagcataaacaagggaaatttaacatttggggcaactttcttccctgtttcccagtcagtacaggttattctgattatatgaaattaaaacacgttcaataagagtgtgtgtgttcgggggagggggggctgtagcaaaacggcttgaagaagtgtggtgtttgatatcttcaattaggaaaaaaaaaggttggggtgggtgtctgcgaggtagaatgggagcgaacaagcacacactggagagaaatgaagagatggagagaagatgaaacagcatgcggcatgctgggtagcatctccatggcaaccgcattgcacatccagagcactgccaaaaacaagtcaagatccaagtaagtaggtgttgcagaaagaggagataagggccggctgtggacaggaaccacctggaggagatgaattatcttgagggtttcatgcttctcatttctttgcctaaccacacctgaggctccagttggagcgcgaatgcctctaaagcaaccctgctgccaaatctacatcttaggcaggaaggtctcaggacagcagggatgaggtctgaggcactccagctggagccaaagaggaaaattatgaatgaggatcccaatctccttgcagctaatttgtttgctttcttaagccattatttaatctagtaatttgcaccgagtaactagatgttgttcttcatttttcaggtccagtaaggaggggaggctacatgggtgaggatcttattgaatgtggaaagttaggtcctgtcaagacagacactgcattcccgtactactgtcccttagtaaaaacctatgcctgtaacttacaggaattctactttaaaaacatgctcaggacatccctggagatagtaaatggctggaaatgtagtttctgggccattttagattacccagcacacgtaaactgaaggatggtgtctatcgtggttcataggtcttccttcacactcaactaagaacaattaagatctttagagctcttgtgcctcctttaaaattgcagcctgaaaacatggcttaaagaaagcatcgcaggcatgtacatgttagcatgccatcggcccttgcaggtttattgtaagagatcaagctgggtccctgatacttacccagtaatcctggtgaatgtgcagatctcgggaccctagtcctaagactaggactctatcgatattcctcggatagaacccgagaacgtgtgttgtcaagctctcttgctagttctgcagtgtagatggttctgtaaaccatgaaatgggggcacttatccctcctcttctgctctaatgactctgctacttgtggctctttgcctggatgagaagagtcttgcctcaagcccaggaacggcagagctgtcaaacctgccagagaactgtgcaaggtagacttataactcagtatcaaaagaaaagcacaaatctgaaagcaactcagggccactggccagaaaatgttaaaggaaggggaagaggtgagatagggaacaagaacataagctaggaaggaagtgagaggagtcggttcttagtgttctgaaccagaggtaaggacgcccaagccctgcctatccatgtccattcaggtgctctcctcatgtgagagccttgctatggaaactataagcaaccataagagcctttgccctcatttaacctgcaacttggctctcccgcctctcagtaacgtgaaattcacttgctagggcatgtgacaatggtcaagtgggaacagaaaagtgagaagccacgtctcgcaggcactcactgctccagggagcttgcatgtgatgccggatgtgatgccatattacagatgaggaaacgggcttggccatggcaaaagactagtgatgtcagacaggtcagaatttaaatgagatatgcctaagccccaaagtctatttctgaaccccagcccaccagctctttcccacggtctagtctgtaatttgaaatgactacatcaaggataaccttcctgatcacatgcctacatctcttctctccttccatctttctccagaactgaaggaactggtacaagtctctctgtgtgtagggtaaagcttcctttgtgactctgttaatctttcctcttattcttcctcattcataatacttgaaacaatgtgcacaccattctttggatgcatctggcttgatgtctggttatataagcctgtattagaaggcatggagtataagcatctacataccttaagtgaacctctgggtgtgatacctagtagtacaaaataagcaaacagatactcctatagcagaaaaggagtggtatcactagaaggtcaaataacccgagttttaagcgataacaaggcttctctgactacctgctaatttcatggccaggttctgatgcagagatgtgcctctgaggcagacaggggagtacctagtcctgatttggtgacagtgacaaggaatgaagaacttgttgtcctatggaaagcaacaaggagtccctagggtttctgcattgtcccgctccatcagcaagaagatgaacatgagggggcccttggcaaggaatcaaaagaacatgtatggctggggcacacccctgaggtgctagagaggacagaaaattctgacaactgtgtcatcttcactcacatgtccccgctctcccagaccgcccggaccctgcatgttttctctctcaggaatggagccacaacgataagtgagccacaaatataaaggatttaatcctaaagccccacaaataacagcatcataaacacaatggtttcaacactagaagcctgtaaattcaacgccttaaatacccaagcctaacaaggaccacagcttacactgtgcagcagaaactggctatgttggcccatacctctaagcccaggctgaggcaaaaggaacagaatgaaacagcgtatcaaaacaacaacaaaacctattcagatagtttaaaaaggggagggtgtagtgttggcaagaagggcatgggactcttttagctgggtcatagaataggaagagtttctgccagggaaggcaggcatgaactgcccagagtatgatggattctgtggcaaggatgaagctgtagttgctgagtggggtggaagacagaagtacagaggtggagagctaaggctgcaaagacagcgagccctttgcaatggtcttgaatatggtgctgtgaccctatattaataagaatctaagaaaagttttcaaacagggatgataagtgatccaattaattttctaattaattttttattgtgaagaaaataatgcctggaataaagacaagcgaaggggctcacggtccagataaggaaaaaaaaaagatgtgagtctcagccacaatggtggaggttgattgaattttggaggacagtctcattcagggtccattgtgaaccagacagaaggattcagagtgtgaagtgggccggatttaaaatgtctccacatcctgacaaaggagaaggagcatagctctgaggtctgcaggcagtgctcagggtggggcccctagagtttatgttcttccttcctttaactacgtctgactttgggctttatgatcatggtgaactgactggaccttccaaagacaggcagaagaggaaggaatgctggtgggtctagcaagaaagcggtgtgcttataccaagcaagaggtagccagcagagtcacaggcatgtttgaaggtgctgctggtaagaatgggaaaatggtccgtgagaacgagctccaacaagccatggtgcaatcaccttgggaacccattgatttcaggttggagaatttgggtgtctttacgtctggggactctcattgaagggtttgagttgctttcactgagacctctcaagatcacaagatcccagccatctcctttgctcagtggatgaggtcatttgatgattatcttaggaaattttgcccaagtctgcaccctgcttcctttcaagttttgttacatggaagtgctgtgcctgtgatttgaagattgcctcaggtgaccctaaagtccagctttaccacattcacaccctcattgaatttgcgtccattttactatgtgcctgacctatgtgaatggcaagaaggcttgcacaccaatttgatacttcagtgaattcagatggacttggactccctctcattactgtatcacattacaggaacgtgctgaagctacggctcactgcaagatccctgcatttggcagtccatttctatcctgttttccacaaagtcaactcttcattttcagcagcaatggggacaggcagggcatcaaacccgaattggcagatcccacccaccagactgtatgcaagggttcaggtttctccctctctcagcccttgtagatctatcatgaatcaaatgctttggctgttctcagtcctcatcctcacccgatggtggaagccctaacaagcaggaaaatgacccagatccaggagaaggtgaaagagtgcaaagcaagagacccagcaacctcacaaagtggataataagtccttgagtgatgagatgttagaaaatcagggccccgggttgatgagccttatttcccacctaaatgctatggagacaaatcagcaagcaaagttgctccaaagatgtaaattcccagttaccatgagttacacagcccaggagacaggcgaagaatgggaaaagcctcaatgttcactttggaaatctgcaagcataaccttaaaatctatccaattcaggaagcagcttgtctctaaatgcgatgaaaaaaaaaatagctcagtctattgagtctatcggcattcctgacacactcacagatggtgcaattagcatcgagctgagccacattctacccccgtttctctcttgtctcctagtaacttagggcaatacctgatttcatatccccttctgtttttaacctttgttctccctcccatgggtgctacagttgctagagggggattcagctcctgcagctgtaaccttctgaaaatgagaaacagggtggaaagactggatagagcgtccagcctccacaatcctcacctaaggttgttctaagattgtacttaggggccagtgtacctggcaaaactgctcaagagttctgcagtgacaatagccaaaattaagaacacttagcctgcgcagtagaactataatatcttctgactattttctgcacttgagttgaatttaaggaatttcatttaataaagaaaaaaaaacaacaaacaaacctctcaccttagaaaagaaagacagtggtgtttcttcagctccatgacctcaccatgtagatagagagtagcaacctgcagccttatttgtaatagccagaagctggaaagaacccagatgccccttaacagaggaatggatacagaaaatgtggtacatttacacaatggagtactactcagctattaaagagtagcaacctgcagccttatttgtaatagccagaagctggaaagaacccagatgccccttaacagaggaatggatacagaaaatgtggtacatttacacaatggagtactactcagctattaaaaagaatgaatttatgaaattcctaggcaaatggaaggacctggagggcatcatcttgagtgaggtaacccaatcacaaaagaactcacatgatatgtactcactgataagtggatattagcccagaaacttagaatacccaagatacaagatacaatttgcaaaacacatgaaactcaagaagaacaaagatcaaagtgtggacactttgccccttcttagaattgggaacaaaacacccatggaaggagttacagagacaaagtttggagctgagacgaaaggatggaccatctagagactgtcatacccggggatccatcccataatcagcctccaaacgctgacaccattgcatacactagcaagattttgctgaaaggacccagatatagctgtctcttgtgagactatgcaggggtctagcaaacacagaagtggatgctcacagtcagctaatggatgcatcacagggcccccaatggaggagctagagaaagcacccaaggagctaaaggggtctgcaatcctataggtggaacaacgatatgaactaaccagtaccccggagctcgtgtctctagctgcatatgtatcagaagatggcctagccggccatcattggaaagagaggcccattggacttgcaaactttatatgcctcagtacaggggaacgccagggccaagaagtgggagtgagtgagtaggggagttgggggggagggtatgggggacttttgggatagcattggaaatgtaaatgaagaaaatacctaataaaaaataaaattaaaaaaaggagagatgcacttcttgatagatgatgtgcatggctttggaaactcggcccctctccccagcctatcacagaagtatataaggctcggcaaggctagagatgacacctttgtatctcacgggtaggatgataaatagacctttcccattcttccccattaggtaggtagcattcctaaagaggcattattcagatgtgacagggctgcacaaatagcaccctgccaaccccggcgttcagctggagtcacctcccacatcactgctgggctctgctccatggcttacaagctgatgagcatattacacatgcggcagaagcaagtgtgcgcctgccattccctcccgttggactgccacatgcaggaactgtttcacattcagggatgtctccaaagccctgcaatttctcagcttgtggagatcacaaacacatcttaagaggagttcccatggaaaagcaagacagcaaagaaagtctaaaattactttctcttgtgggaacatacaaatattaaccaaaggtggtgttttttgagagaataatttcagttctgcatgtggtgaaatgatccccctgtgtctgtgtaaacaaaatatatctaaacacattttcaaagcctgggaggaaatattccaaaatgtaagactactctctctgtgtaataaaaatttacatattcttaaatgtataccaaccaaacaaatgacatagtgtgcaacatatatgtactagttttccatcttgaaaaatatcttaagaaccaaatatttgtattaatcatttgtatagaatatgacaagcaaataaaaatgattattgtaatatgtaaaaggtggaaaaaaacccatccatcaaaatgttgcccttgctatagtgggattctgtcagcaacagacaaccaacagatgctggctcctgagtctccagaactaataaaacttctctctttataaagttaaccagcctcagatgttttgttacaatgatgcaaaaataacttatataatgagtgtgtagttctaacaacttaaaaataatttatataactagtgtgtatacaagttgtaacagcccaaagtaaattctcattgctgtcatgctaaaacttaagaattgaaaaattaaaataatagcataacaaactggatgcctaatgatagtgggtgcacaaaaccaagaacaagggtcagagacgagaacagaataaaagcccagtgttagcgtggtggatgggagctgtttttctgctcaaaatgtgttgctgctgttttctgtccatgggctttcatttaaaaacagagcctcgctgtgtagcccaggctagaattgtgctttccaccatccaccctcttcttcctgaggtcaaggatagcaggcatgtgccacactgtcacacttgtttctagctcttaaaatggaatcagtaccatgttttttttttttagttggcttactctggttgtggtaagagtaccttcagcaatggtaatacattgtccctttgatgtaattagccaatgggtttgcataaaataacatgaagccagtactgacagaaagaaatgagcttaccacttgtggtactctgctgtgtatctgccttcccagcacttgggagatggaggtagaaggatcaggagttctaggtcagccttggctacacagcatattcaaggtcactgagagggtaagagtgaaagagtgatggagaatgatggggtatgaatgtgtatcagctcatgtctacctgataacagtgcagaattatgatatggacaaagcaacacggcactacctgcagtataagaaattaataaacaagtactactagagcacttgggtcttctacatcaaccagactgagtagcactgacgattctagtccaggtgggtctgaaaccatcagcaatctgcaggggactgacaggagtgaacacatacaaggtgtttaagtggggatcttaagaatgactggggtggcaaaggaactatgtctccttcaagcctacagaagaaggatcaatataataaaaagtagctccctcagcgccacagaggaggagagaaacaccctatctgatagaaaggaaaactttgggggtccaaatcagtatttggtagaagacattacactggaggtaggcacactcgaacaaaattagtgacgtcacacccttacaaggcagtcctcttttcttcttcttcttcttcttcttcttcttcttcttcttcttcttcttcttcttcttcttcttcttcttcttcttcttcttcttcttcttcttcctcctcttcctcttcctcttcctcttcctcttcctcttcctcttcctcttcctcttcctcttcctcttcctcttcctcttcctcttcctcttcttcttcttcttcttcttcttcttcttcttcttcttcttcctcttcctcttcctcttcttctctcttttccttcccttcccttcccttcccttcccttcccttcccttcccttcccttcccttcccttcccttcccttcccttcccttcccttcccttcccttcccttcccttccctttctttacctttccttccattccttttcctttttatgggggcatgtttttaactttcagagaaatttcttctaatgaggcaaactcctcctttgaatagcagaggagttgaaaacaatgaaacactatgcatgtcaggagcatggggtggaaaggttagaacactagaactttttaacagtttttatcatgtgtgtagtaagtatactgggtctcacttggattgtgtttatttgccagattttgagtggaaaactgatagaccttttttcattcattcagtttacatcttgatcccagctgtagccccctcctccttctcctcccagtcctactctcacatcccctttcccccaagatggggaaggtcccccatgagtaggattattttaaagttttttttcagatagttcccactaggtagctccagctagtctggaactcactatgtaggccaggctggcctccaagtcatagagacctgcctgcctctgcctcatgagtgctgggattggaggcgtgctctaccatgatcaggaaatgatggatattttaaggaagccaaacggcatccttctcttcttggcctgtgtaatctgcctgtggactctttctacaagaaccaccacataatgggcaatcaacttgagtggatggataaatctttacaagggaacttgtgtccaagggaaccttcagagttcattcaaaatgataaatgccccaccatttgtccctatcaagagtcttccattgctcctccccactccacccagacactcagattgcaatggaaggttctatttgatggtagagactaggcaacttcaagaagcttagccgcacccaacagaggtgagtggtgaggggtggctcagcactgtgatctgggcaggcactggcacacagccatgatcagttcatgcctcctgtatcatcagttcacgatctctgaatgtcagacaaaggcaaaccaaagcagaggctcagaaggaggagggaggaatcattgaaagctccctgaaaaatccttaagcaaccccttatatgccatccctcttccaagtaagttgagtcttttctacagaagctaatgctggttgcttcaaagtccaagaacattacttttttaagttaaataatctcagcaatcatattaccttagtaatcttcaaattagtattcacattaattaaaatttatgtaatgggtgttttataattcatggacctctttcacgtacataagagtttctccattatcattcttgggaaatatttcccataagccctttgtctaatctctccccagccacggctgagtataataaccactaaaatgtctacaattttactagttttaaggttaaggatattcccctacaagagatctcaaggtgttgcttttatttgataatgtgatgtgtggcccagatccaaggagcacttagtaacagaaccaaaaagccagagcagacttgtggcatctgtttgttcggagatctatgggtttcccgactggccctccggctcctcatttcagtaagtcgggaagtgtcactgcatccatgatagatggaaagatccaggcttgaaattatcacaagtggctgtggactaatgcaggaagcacagctgttcaatgagcattatgatttgaacacaagagcagatcccattaatctgtcctccatggggggccacacacaattagtgcaaagcaatccatccctgggtggcaactccattataatcagggatttagcttcacttccaaaggccgcatgaggagggaccctagaagagtgacagggcaactcttcagggagctcctcggtacaggatgcctcagtcagcattaagagcgtgagatgctgctttggggtcagctttctattgagtctctgtcttcttccttcctttgaagcgttagtgttgtttctagcagcccccaattccagggttcatagttccgtcagacatcattgacatcatctgctctctccctaccatgcaagtaagtatgtatgcagccagcaagactccatcccttagcattaaggtctcaattcacctaggaggaaagagatttgcttgtcatcttatttgcatgcaggctcatgcaccacaatgcgaaggccaccacagtcttttcattacggtaatttcccacacctggcaataaggcgctgtgaagaatcaatgcttttttcctaatgtgttcaaagatgccaagtgagctaaaatattctgggaatcactgacaactgttgtggacctgggaatgtgtgcttattacctcaataaatttctaactggacagacattttaggaagatattttatcaatgagtaggcttttctttaagcaattttatgtctataaagacggaagacagaaaatgggtgatggaatagatgtatcatgaaagcagaataggaaggaggctatttgtaggggagaaagaggctgctaacaagaatgagatagagaagtgcgagagagggagagtggaagagaaagaggaagacagggggatggagaggccaagaagagttagagcaaagcacaatggtcaccttgggtaatgtttattgtcaacttgacacaccctagagtcacctgagtagagggaacctcagctaaaaaatattgcccaggtcatatctgtgggcatttgttttttgatagctaactgatagaggagggccaagtccaccgtgggtggtgccatccctaggcagttgggctgtatataaaagctagctgaattttatccagcaagctgattcctctgtggtttctgcttcagttcctggttgagttcctcaccctaacttctctcagtgatgaattgtgacctggaaatgtaagacaaaataaaccctttcctccggatgctttaccacagaaacaaaaggaaagtaagacagtatatgtaatatgtcatgtatagcatgtataattatatatacaataatgtcacatgaagccattttatatttaagcaaaacttaataaaaataaaataattttttaaaaaaagaaatgggctttgcaaacactatctagtgcaggcagaacagcacgttctcccgtgcgcccatgcttcctgtctgcactgctccgcatgcacacctgtcctctcacaacttggtttgtagtaattgcatgctccgtgttaatcaatcatagtctacaaattagcaaatgcagttataaaactcaattcaatctcccagagataaccacgttcttactttcaacaacattcctagatattgcccaagcacaaatatgtaagtgaaataaaatgcgcgtcacatcgtatacaactgttctagcttattttccttaatactgtcatctccttcctcacacacagatggaagggtatgaagtgtagtattgaaaatcctaatttcttggttacctaaaaatgtaattgatcccttcttcacagaaagttcagatttttcaatttacaacatctggataacgtctcagtacgctttaccggttctttaaaattaatgctgatgagaggttcctttagctttaaagtatttgttcccacaacaaccttcttctacccagggaacccacataatggtccacaactgtgacctcacataattgccttcattcacaatgacattcagagtcaaactcaaagtcacaaaaagccacccagtgtgcagattctgcagtcacttgtccttgtactaaaggagagggagagactggatgtggcaggggataaagagatgtgggctgtagaggaggaggagttattactgaaagctagtgagaagcaacaccaagacggagatagaagagccatgagaagttcctgaagatggtgactctagttatgaggaaagaaggtggcatggaagccaccaaaaagagaaagtgatgcagaggctgacggtgatggtggtgcttcaaggttgtaatgcacaggggaatttgagccaggaaaggaggcccactatactcatgcaaagccggggcaaggagcaacagcttttaggagacaggagccttggtaagaaaatgaaagctgagagaatagagccacagctggaagaaggacgaaggacttgatctctatcaagcatacggctcaaatggccaagcagtttgccaacatttctcgatgactcaaaccatgtcctgacacaatcagtgatttctcttacttactgcacattcatctgctgctaggaaccctagcaatggaaacaattccagtagccttgtgtccttctccgtcatcatgacgtccccatcctagccctcaatggatacccacgtggccacctaaactagggacctaattctctaagccctattggcaccttctttacatatacccttctgtgtcctgcagacccacctctccataattcccaccatggttttattgattcggctccacggttctgcctcttccaaatggagtatgtggtttacagtattgtgaaggttcaacgagcccacgtgttagataggaactgttaagtcctctgcctgaaatactgtctaaacttcattttcaccatggttacatttattttctcacttaggaataaagccattctgctgataagtttccccataacttatcaagactggaactccgaggagccagtttctttctgactaaaatatccatacagattgaattcagaactgtccctgtaatgaatgctccttccctgattctctggtgccctggaatcccttgatatgacaatctcaaccattttgttcctttctgtcataataataggcactgtacactcatgtgtctgtccacggagctaccatgcacctcacacaaaggaggctttaggaatgcgaattgtattcccccttctctcgctttagtcccttctcgctgtcgccttaacttccccacagagcacaaagtcatctcacagggaaacaaatgccactcgactttactgttattatatctgttatttcaaggtctttaggcgcaatactctaaaatgcactggagaaaaaaatgtccaaaactggtcaaacaagaagggagcagactgtagggagcacagtgccttgcattctccagctttacatttcaaagtcacttcaagacagaaggctccaaactaggctcctaaggactccttccatttgtcacccccaaatggcttggggacataaaaagtcactgatctggtctccaaaactgtccttgccgtaagtctgaattcctgctcactgtaactttgaaacaatgtagacagttgcaggaattcagaggactttccagaagatggctaaagacaaaaaaaaaagaacactttgaggcaaatctggggttgtttttcatgacacagaagaagctgaaaggctacaatggattgtttgtttgtttgcttgtttgtttgtttccaagttcatgagagattgttattgatgacctcatcagcagccgctccccatgacctcagtggacaacacaagaaaatgaattccaagcaacaacatttcaactagacaaggagacgcctgctcagctgcttaaatactgggataaaggtcgcaagaaacgttgccatgctcttcttgcgaagtgtttccagggacaatgagcttagcagaggacacatctgaatacaggggagatgacttccagtgttacctcaagtgtttgaattgatacggtcttacagggtttaccggtgtgtctcattggttacagaaataaattggaactggaaagaggccgaggctcaataatcctgagaactcagagccaggattagcggtagagttaattcctgaatagacgctggaggtgccatccaccaacatgatcatattctagctctgttgagatcaaaggaaaaatgtctcagctcacactttcccagtgggagactaaatgcttagaaatgaaatcgttccttccagtgacttaagcagaactcaatcagcagagagaataaaaaggtcgcagcagacttgcagtttaatcagagtttctagtataccaacatgcctcccatagatggacagcccagctaatgctgtttgttttgtggtgagcaatgtttgttaccttcttaccccagcctgaaattacaatctcaaccttctcatgctggaccaatctgactaccttgaaagctgggccctgaacatgaagctcagacactgagaccatgaagcctgaggtcccacagttaatagcacatgaaatcatgaatgacagagcatgccacctatattccagggacttgagaggtaggcataggagaattgggagtccagggtcattcttcattacaatatcatatagagctacctatttaattccaggctagcctgggatacatgagaccctgtaacaacaacaacaacaacaacaacaacaagggtctatctagagagatggctcaactactctcaaaaaggattgtgagtttagttctcacaaccttctataactggaattggaactctagttctaggggatctgatgccctcatctggcctttattggtactgcacacatgtggtgcaaaaacaggcctgtaggcaaacactcatacatataaaaataaataaatttctttaaaaagaatgaaagaagagagagagagagagagagagagagagagagagagagagagagagagagagagagagagagagagaaacccctggctcagtcctacctttttttccttcctgtcttgagaatttaacccaaaacttcatgtgtgttaggcaagtgctctgccaataagctactccagtcagcctcagatgccagcttttaaatgaagaccccaagactccctggatgggcatgcaagacctacatgattcctcttctaggcccaagtggactggaccagagggtcaaagcaacagagctaataaaattgccaattgccgatctggtaattataagctcgatattcctgtgaagactaaggacttactaagttggccacagtgagagagactttggctcgaatcttccatgcattatctcaagctggtcagcccccagggcttcccatcttcctcagaagcaggctcttcccaaaacactatctccaccctcttcctcagaaactaccctgacattaactacccttacaacacctgagcctggccacccggtgctaaccagcttctccaaaccccaggagggctagtgtgtaagccctttatgtctgaaggtctttctctgtggccatggaggtaggtggaaagggatttttagaagcacgaaattataataagatgaaaatattcttagggctttggtctggctccttgatcttaatccgcttctgctgtggcaaacggaatcttgtttggctttcattcttaaagcaaaaagccaataaatgtcaaacctcaaccactccccattgtgcccttttcttccgtgaaggtacagtcaaggaaggagggctcatctatcctagcatcaggtggcgccgcagatctcatagggacagcacccaaatcagtatgcatcctcacattcattctgcctgaatccagtagctcagcaacaacgagctaaaaatcatagcagagtggtccagttgttcttcatttatataatagcccctcccactccagtaatgctacctctcacggtcattaggattttatgaatctatagaaaagttaaatatgctgtgtcaatgaacaactcaatcaaggcttactttttaaaaaacatcagatattttgtatcagtgcatggtcataaggtagcatttccatacaatgcccaggcagggtagggcctgagattggtcaagagtgtgagccagagggctctgtgtgtggtggctttgagagggaaataaagactcgtttagatgttcaggactgttgttagcatatttctattctgtgcctgaaagcaaagaatgaaagcgtaccctttacctaagaaacagtgtattcagaacctctatgtcatagtggggcaggctactggacaccagtgggtaaggcacatagcgctctctagagcgctctctagagggccaagggggaattctcagcactgctagaaacctgagggatgcactttttttttttttttttttttttttttttttttttttttttttttttttactgtagggaccaaagtactcctaggcaacgaggcagagcaggctgtgactcagcagccgtggggctgtgtcaaacttagcccagctagactggacccaaagatcagcagcagcaaagataataaggctgccgattactgatcaggcaattataagactctttgacaggctggggaaaaagaaaagcagtttctcattttctcctatgcctgcaattttatcctgtcacactcgaattagctctttgggagtagatagtcttgtgcccattctacagagaaatacaggctcaacttgggtgggatgaaaacatttagcccagccacagagattccagcacatctgtatgtcatgtagcaccattcgcaatagccaagttacagaatctacctaagtgcccattgacagacaagtagataaataaaatgagggcacacacacacacaggagacttacacgcagctatgacaaggaaggaaattgcataatttgcaggaaaatgaatggatcatgatgttacgtgggatgaacaacatttagaaagataaagactacagtttatcatgagacatgaaagcagacgaggttacactggggcagagaaggcttcagaaagttggggaagaagagaaaagagtggtgagggaagtgtgtggacattggtgaaactgcaatgtgtaagcagaagcatataatggaacccatttcttggtacaacatctttatgccaattaataaggggggaactctcttgactttcattgtcatatgtctccataaaacccattgccccatcacaaaaacctgacccttgttttttttgtttggtttttttttttttttttttttgcctagcttcacctttcattatgtttacatttgcagagtaatggagaggaaatttagaaaaatgtgtttttgagcctgtactatgtcctaaatattttatttctccctgtgaaataaatgtcattctatggttatataaaagaaaaacgtcacggaaacacagagaggttaatcaactcgtccaaggtcatcaggattggttgtgctaattaccttcttaccgctgcgaactgctcagtgcacagccctgtgtgcatccttatttattggcctttttgttgttgggcatccaaatgtccttattgagagcttctgatgcgtatgtacttccaggctctgctctgagaactcgggatatcgagaacagagtcttccccctgaggaacttcgattcgaacagtggtaacctggtaagtaaatgctaacactaagctataaggtgaataactgggttttcgtttatcttgtaagtgtgggcattcaaaaatccaagcttcctggttctggttcaagataaggtgaagtaaaggcaggccagcttgtctctcccactgagtagagccataaagcctgagctgactgcatgacacagccccttcaggtctctgaaaatcaagtatcaacaagcagattaagaagaacactggaattcaaaatatcaccaaactactggctgtaatcaagaatcagaatcgcaaaacacagcattcaagccagccagaatacactcctaaatcactcagcacacagagaaccacggatatttcaacttatgtgaagaaggaaaaaaaaaaaaaaaacaatcaacaggcaaaaccatggcacagatgctggaattatgtggcaaaaatgtgatgtagctactatctataaaaatagttaaatgggcaatcagaaacatgtctgacaaaaggcatcagcaaagacagaggagacatgcagaaaaacaagtggaaattttagaagcaaatgtataaagcagccagaataaaaacatccccgtggctgagggcatgcccagaatgctgatgacagagaaggctgagatctttaaggctatttaaggtgtacctcctcctcttgagccccagattctatgctaaagtcctagggtcctaactaagagtgcttgagttcttgaagccaccggctcatcttctttttttttttttttttaaaagattttatttatttattatatgtaagtacactgtagctgtcttcagatctcattacgggtggttgtgagccaccatgtggttgctgggatttgaactcaggacctccagaagagcagtcagtgctcttaactgctgagccatctcaccagccctcatcttcttagagatctattttttattacctcttttttttcctcccctctaatttcttttattacctgttggtggaatatatttctggcaaggatgtagagtagtacatccattttttaaaaagtaggttgaacatatcttataaattctattttgggatatttgcccaggagaaatagaaatataaataacaaaacagcatcaacaaaaattcttagagcatttttattcatcataggtcctaaaggagaaacaacccaaatgtccatcagtagaaaacaacagattctgatctatttatacagtggtataatgctcagctttaagaagaacatattgttgataaatatgatgatatgaacggattccaagcctgcgcattgctcatatggaggtcagagaacaacctccagtgttgctcctcgggcactgccgaccttttagatttcttttagttttttgagttattctgagagatagaagccagattcaaaagaacacaaatcttataactgcttttgtgtaaactaatattttctgtcaacttttgatactatggagtatcagcatatggctatttatttatttatttattattggatattttctttatttacatttcaaatgttatctcctttcccggtttcccccctttctagaaaccccttgcttctataaaggtgttcctccacccacccatccacatactcccacctcccaccctcaatttccctacactggagcatctatcgagccttcacaggatcaagaatatcttctcccattgatgaatgacaaggccatcctctgctacatatgcagctggagccatgtgtactcctttgttttgtttttccttccctctaatttcttttattacctgttagtgggatatatttctgacaaggatgtgcagtaataaaaccatttttgtaaccatggcttagtccctgggagttctggggggtctggttcattgatattgttgttcttcctatggggttgcaaaccccttcaactcctttagtcctttctctaactcctctgttgggcaccccacactcagtccgatggttggctgcgagcatccacctctgtatttgtaaggctctggcagatactctcaggagacagctataacaggctcctttcagcatgcacttcttggcatccacaagagtttctgggcttggtaactgtatatgggatgaatccccagatgggacagtctctgggtcacctttccttcagtctcttcacttcatctccatatttgctcctgtgagtaattttgtattttgttctccttctaagaactgaagcacccacactttggtcttccttcttcttgagcttcatgtggtctgtgtattgtatcttgttttttttggagctttttggctaatatccatttatcagtgagtgtataccatgtgtgttcttttgtgattgggttacctcactcaggatattttctagttccatccatttgcctaagaatttcatgaattcgtcgtttttaatagctgagtagtactctattgtgtaaatgtaccacattttctatatccattgctctgttgagggacatctgggttctttccagctcctggctattacagataaggctgctatgaacatagtggagcatgtgcccttattacaagttggagaatcttctgggaatatgcccaggagtggtatagctgagtactatgtccaattttctgaggaacctccaaactgatttccagagtggttgaaccagcttgcaatcccaccagcaatggaggagtgttcctctttctccacatctctgccagcatctgctgtcacctgaattttttattttagccattctgactggtgtgaggtagaatctcggggttgttttgatttgcatttctggcagggcctctcaggagacagccatattttgattggaacattatctttatgaaatacttttaagactctgctcatcatgaaaaacgaacattctctgtcaactgttgatactatggagtgccagcatatgtttctcaacttcaaaattataagcctaatttaatactgtaaacatttcccaagttccagtcatccttacttctcaagtagtccccaggaaaagctttgtgttgtaatttaatttaaattcagaatgcatagtggtaaatacatttctccacttaaaattgcttcacctcaataaatactaaaagtacaactttgtgcagaacacgacagtaaatgatggaggagttttaagactcgtgatatatagcccctcctttcatgccatgtagcatgagataaaacaccaaactactgtattacaaacagaatatatctgtaaagattgtagtacagtataaatggtttttgaagcctgtataatacatttgagacatgttagctgcttcttctaagagcattggttgaaagtcattccaaaatgataacacattaatccatttaatgtgctactgaaaaacatagctagcagacatgggttaattcaattcatcaaaccccccccatttgaccagctttaatactgttagcaagtagtctcaaaaatcaacagtagatgacgtagaaaccccagatgccaagaagtcttgcctctgcaagacaggcaatgggatttcccctccaaggaggaactgacttctttctagaggaatcagagagtttaattctctcgattcttatctaagtagcaatcaggacccatatgctactaaaagaacagctgcaatacttctacccaaagagcaagagagtcttaagaggccacatgcttaatagcacactcaacaagtgagtagctgaggatgtgcctgtaggttttttatcttgtccttctttacggctgtcactgttaccaatgcttaataaagaacaatggagagagggtggagcacccttgagaccatgcaataagtgcatgagaaagtattctacaaccgacccagaaggggaaaacaaagcccaagcacactgaagttccattgcatactagtccgaacagccaccattaacaaataacatgtagacttggcttccatctttgtggactttcagtccgcatataaattagtccagcccttatagaaattagtaaggaggttcataaaaactaaaattagaactatcatatatataatccaggtgaaccactcttaagcgtgtgcccaaagggcgccaaagtcagcaaaccatagctaaatcttcatgtaatgtttactgtagcagtattagcaacagctaagtcatgaggctaaagcacctgttggcggatgaatgtggtgcgtatccatccacacaatgagcttatctccatttctatagagagagcagaagtatgtgacgtgcaagaaatgaatgaaactgaatattatcatgataagtgaaacaagccaaagccaaactcagagagacaaggccacatattttctctcataaaggtacctgatatatatatatatatatatatatatatatatatatatatatatatatcattaaggtaggggattatatttgggaagaggaagggaccagcaggaagtgaggaggtggacaaacgagattaataagactatatgattaaaatacattttatatacatgcatgaaaatatcataacaaagcccattcttttgtacaattaacaggtgctagttaaacagggggaaattgaggcaagaaatcctctacgttgggaaatctggttcctcttctgaacactactgcaatcccatacagctgcccggctgtccactggaaaagcgcattgtgtatgaagtgtgagacaccagtgctttgtgagggctattcttcctcctacagtccttaccgctcctctggacctagaaagtaccattttcagtttctgtttagcatccttaaggtgagcattgtttttagccctagtttccaaaagtgaaatcctcaaggctcccaaattaaacagagttctaaaaatggatcctgtatcattcaaccaaagactgtctctcaggaaatgggtgggaataaaattctctccttcctgttctcccctcccccctcccttgagccatcactgttgatggattggagatgtcagcttgtcagctcttattgggtgctgcctgatgtaagtccacactgaggcagtgaaaatctgtttgcagtcagctcttttaataagtcccaggaaacaggaggaaagcagatcattgggcacgatgcttcctctgatacggtaggggaaatcgccgatgacagaggcttgatatagagaggaaggtttgaaacaacgaacagttcttttaaagaaaaaaaaaaactgaaaaaaaaataaaaagtttcccaacaactttggggattctaagaaacatgacacttttatgtttgtgatttaaagttgacctagactccattgtttctaaaggaggtcagatctcctgcatagaaagcccccattccagtgagtcctgtgggtccttggcattcagtgggttctgaactctggtgaataatattagtgcctcctcttattctcagtccaaagagggatcccccagggggttacctagcctcttttcttccccagaaggataacgatgtctgatgctatcaaaggcactggagatgtatcacacaaagcatctagcatttcagggaacccaagcagaattccctagagagttctgaattctaaaagtgtttccattgcaccagcttcacgttattaagatcaaattaggtgccaggttcctgaaaagagcactccagtcttttcaaatatcccctgacactgtgtcagtgaattgccagagtcgctgtgctgtgagtcttatgatgctaaatgctggtggatgatggagatagaatagtcacggtgaagatgctgacggagatgataatggtatccactgctaataataaggcaattttcttaaatgagccaactaggtgaaataatctaagaacaattattatgtatgtggtaattcaatcacatttctggagtctctctgttaccattagccacgtcacactggaagaacacagaactgacaaaaagtgaatttcagaagtctggctatcaacgttccagctaaagtgattgcaggattagactgacaaacatgtcctctctggtaggaattaataaagtaatgactactgaaggcccaaacagcatgtggcttttcatgattaatcttacacagaaagttaactatttccttcatttctgacctccaaggcaagtagcctgtcataagcacacagcttgtggtttgaatgaatgtgtgcatgattggataaaggagcgtataaatgaataagttaatgagtgcttctctgcttttcataataaatagtacatgtgccagtaataaatacatttttagcaaattttggtgttatgctctaataaaaaatcatcttgggctgggcatggtggctttccattgtgactccagtacgtaggaggctggacaggaagatctgaagtttgaggccagtctgggctacatagttagacttcatctcaaaaggcgtatgtggcagtagggcatatctgctcagggaacctgaatcccaattttgcaaatgaacaatattacattatatcaacttaagggatgtattaaaaatatgacaacccctgcctcccccaaccccctcaaagcagaggaaactggtaatgatggcatgaaagtaaaccccttttaaaccattataaatgtcttctccatatccagagaagtttgattaaaatatctgcagaagcataggggtttatccttatgcagcatttctgtgttctttctaacatttacataccttccccataatatctatttagtgagctaacatcaataaaatcttttctgtagattaaaaaacactcaaacctgacaactgaagtctccaaggagagccagtgacctaaaccaatactagactaagaactcagtggtgttatgaatatatcacatttgcttctgtatctacaacaagattgattgtaggttctatattaaatgtgtctgacaccatgcaggaagagctgcaacggacaagtgagcttcctagagatggcccaccatcttgctctgctgcaataggtgaaccctgaagaggcacagacccaggagatggcccaccatcttgctctgctgcaataggtgaaccctgaagaggcacagactcaggagatggcccaccatcttgctctgctgcaataggtgaaccctgaggaggcacagacccgggagctttctccctgggttgcatcttgctacaagaatgccttctcaattttttcattgctatagtcctcatatatctggcttgatgtgattgggcattgcgagaccctcactgcctatagcctggtgattacttcttggctcacctgttgggcaagtttcctatccatcaacatgaagatgtacgctcttgagacaatgctgtttaggtgacttaaggatttcatggaattcctgatttgatttagatagttttagaaagctaggttgaattaaataagtttgggaagtgagggtagttgatagaaagcttgaagttagaatcaagaatagagcatgccccttcctcataaaatagcaagagctgaataggttagagaaaggagtacattttatacattacaagcatgaaaattgtagtataaataaaaatagattgtgacaagttaatgatcaaaaaaatattcattctagtttgggcctgaattccttaatctactgaaccagggatatgaccacaggtttcaatgtgtactgtgaggggaaggtcacgaacgaagggtagggctcattcacatttcattgtgaatggaagaacaaagaacagatcattacccatttagttgaccatgccttcaaaaataagacctaagatagatgacctgctccttagtaaatacaagttgtcatcagctaagaatagggaaaattttcttactatagacttggttgttaatctatgacataaaaattattgctttggggttacaatgaactcatggagagaaagagagatgttaaacataagtttcaaaagaagaatatgcaatcataatgctgctgtaattcccccttcctgtaatgactttaatctgttatttgaagaatatgtttttgtggtgattgtttttagaaaatttttaactgtggcaatgaggtaattttcttcttacatagaaaactttgtcttaaggggtataaaagggctaggggaaaaaactaagttgttgaagcctgctcattggagcttgccttgcttcatatactatctctgtgtgtgcgtgtgtgtgcgtgtgtgtatgtgcgcatgtgtgtgtgtgtttgtgtgtgtgtgtgtgtgtgtgtgatttttctctattctttcttttctctagctgctggctgtccttggcagcagcctccattgggtggtatctgaactgacctctgttagctctactaatacctgacacctgcactggttactattagccgtgacactattgctgatgccaaaatcaaccctcacctgctaacactgtggttactgtgttaactttgacaaaaaaaaacaaaaaatacattcttaacgaaggtatgctagttgttaaatagaggggtggaactggaatgcaaacgtggaaacttaagagtgtgcaaggttagagacagaccagcattgtgtgaggaggtgaatcagagaggttccatggaggattcgaataagaatagtattctgctggaatagtagctatgctagggatcagtacaaaactaagcttctcatttggaaaagcactaagcacttagggacctcagcatccacatgtgaaacttatatgaggttgtctgtcctttagcatcttagtccttgagcaagactctcattgcatggtcacaaggacctctggtaagtaccaaacagcatgctttgtaaagaaatgttgtgagaattccatagatgagctcaataatatatatatatatatatatatatatatatatatatatatatatatatatatattatataaagaaataaaagacagggtcaggcaatgaagacacaaaaaataaaggtggaagaaacaaattctcttgttaaaagaaacccttctttctcacatctgaagctgcagagttaatttgaaattgaaagcccgtggttgagaggaattagctgctccaggatacatgttattatactattacattcctgtcatgcatgttcacacatgttggtcctacttgtccaatttcagatctttgagacggaggaaaatcctttttatatattcttcacctctacatatgatgttgagacctgatataactaataacaaattctaattagtcctggtacttcaactgtaaagtagatatagaaaaacttctaggtgtgcaaacacaaaacataagaagagtggattttcatgaaaagtggaagttaggggaagatgagttagcatttcttgtgtaaaaagcacatttgaattatattatactctgcctccccccctcccctcccttcccctccctcccttcccctcctctctctctctctctctctctctctctctctctctctctctctctgtatgtgtgttgtacacccaactgttacatacaatcttcatctaggaataccatccttttaggattggcaaagctggaatgagagtgatttatacattcagttaagcagctagtaaattgttatggattctggattccaagcatattagaatttatagcaaggtaaggctgactaaaatatatagtagcacagaaaacagatagagcatgacaatttttggaggtaataataataatgatgatgataataataataattgacttgaaataaaaggcagcactaaataaaagtataactagaattaaacttacaaaggcccatttagaatagtatctctaatttaggaacataatattttccattagccttagttttttcaagaaaatataaggtagaaaataagaacgaccagaaaaacatagtaacagaagtcaggtctgatcattgctgaggatgggccaggagagctactggcaaagattctgcacaccaaaggtggatagtaatgaggtagaagtaggagaagtcatgagaccatcttcttctcccaaatctaccatagacaataaactactagatattttaaaggatttcctgtcctgctggaaacccagggaccattctacctttgccttcattttatagatgagaaatgaaaatcacaaacatatcggcagtagaggggaaggctcagtttaggaactgtgagtctgaagttggaaacatccttttttgttgttgaacatctcttttctctttgtctccccagggagactacctgacaactatggttatctttgagaggggagaaaaaggacagaattatcccaggggacaaccatgacactgtagtgtccctagctttttaccctgggtcatctgcctgccatcataggtgccccaacagacacaaccataggtgtgcatgcatctccccgactccaaaccctacagagcttccattcctgcatggtccaccaccaggacactagagagtttctgcttccttccgtttggtgaaacaaagtcgtacaagctgatcaattgagaaacgtaatgaagaatactcgtggattcacagctgtaaatacacactggcttcaaacagtactaagggaaaaaaacaaaaacccggtctgaaatggatgggtgaacagaagacgtgtgatgtagcagctggcgttttatcatgatgggaagtttctctgggaaactcccatgggactggagatgccaaaaacataactaagagagcatggtgctgccttgcacatttaagaggatcgggaagcccctccagtcgattatatgaaatcccatgtaggcagagtttgtcacatgagcttaaacttagtagagatgacaaagtcaacatgccaccagtctatcacagactatgtggctttgtatgtattcattcagggcgcacaatccctggcttccttcgtgacatgagtgaagcacagttgcagaacgtattccatgagcatctctctctaactccttggctgaatgcacagtggttgcagaagcccttatagagcagcccactccaattccacaaatgcccatacacacacaaaatacatatgagcatgtacctgcatactctcaccaatcataggcagcctgtactactcagtgtgtctcggaggctactggtcactccacacacacacacacacacacacacacacacacacacacacacacacacacacagacacacacacacacacacacacacagacacacacacacagacacacacacagacacacacacacacacagacacacacacacacacacacacacagacacacacacacacactcctttcctcatcgtccctcacaccttccatttgcagctgtccagatgttgatttacacccagcctgcagcagatcccctttcccttctgtgcccaggcttcctctggatctcagcctgtacactgatgcgatccactcactttctggatcaatctacgtgaacattccgggggcattcagcctcctgtccttgcttgctctcacccagttgagtgagcactcaagtgaaattcaacttcttggttcgctcatattattcagacagttttcagtaaacaatcctccatctgctgttatcactcacaaagcatgcatgaatatggttcttttcacagaaaagctaattcatcctctaacacgttgggtcactgtctgaaggtcacttttcttcatataaaacctgtgacctgctctaaacgcaggcatcaggttcacatgacaacttcgacacattgcatgtgctttggaaatctatccttatgttaacacgtcccttttgtgccatggctacctgggcctcggggttaggagacaattccgttcttttacagaaatggaatcttctaggcaatcttctagggcaatccaatccgtctaattaattggtgttcttctccagtaaggccctgcttgtgaatgcccaactggttaatcacaatactacttctagttctacaatcttgtgtacttctaagtggatacagaagatgactaacgcaaaccctcagttcccatataaagccaggaaagagttggccccagggaaagtgaagtgtacttgcggcatgacgaaaatcctagcaaaaaccaagggatgtacctggagtagtgcagacataggtaaatgtttgataagccccttttttgtctaattaaaaaaataactttctcctatggacaatccctggctagtgtcacctcctgggcacctgtggcctggcatatgtcagagggtgtctgactctattttggtttatatcagctaagccaacttccttttcttatatagccagttaaaaatagtatgccatttctagcaactgtgggcaggacatggtgagatgcaaggtctatatggaaggtacttaattcagtagcaggttggtgtaacttgaagggttacctgcagctcgtgacactaaggaataccctgttatcataagaaatgcttgccttgttcaagacacatggatgtagtatctgatttaccttctcctgcaggtgtgcttcataaaggtttcataatttcacagatgccccctaaaagcctcagcccttagcaattctatcccaggctctctccccattctttgaagtttagcaaagaattaaataaacaccttattcataaacagcccttctagagttttagagagaaagggcgggcctggagtaaaggcaggaagaagaactctggtgtaaagagtgagactacacaagttaactggaaactgcccagagtcagtgaaccatatttgctagttttttttaaagcaaatatcatatattatatagtgggttaagtgttcagagatcaatacaagtaagttagacactggtcaaagggtcataatacagacgtctaagtgagaagagagataataatgctaaaatgaattaagtgaaagaagcagccaaggagagggagagacattcaagtatgcagggtaaaacagcatgtttgagggacaggaagaatgtgaaggaagtgtggcctgtaaaaatgacagcagacaactgaggggctggggaggagtgcctggttgctcacagacaactgagggtcagtgaaagaatgctcgaatacccatacagatgtccatttgactctagactatgtgcctttttgttttctaagtcattctggtgtggtgtgggcaaccaagagattcttgtatcccaggaagatgctggctttgacttgatgcccgaaggataggagagtctcccatgtgaagaaaaggcagctctagtggtttgtgcatgagtctgaatttggtagtagagaaaaaggataaattaaggaacatttgagcatctgagctactccacccatccctttcctgggcatgaagattaaagtgtgaatttcagagtgggaaagatgttcctatctgtcaccttggattttaggtgcccatcacacaatgtgtaggagcatctagtggccaagatggcctagagagtgcaggagaggagtcctggttgggagatctctacttgagatttgctgtatcaaaagaatatgtaaagccacggattaattgaactcacttggtatatttttgtaaacatggagagcctttctgaccttagctgtcaggataaaatcgtgttttcacttgtctataatctttctagtcacttggaataattaaagcactctggtaaggaaatttgataatggagtgtctgggtgtactgctggagtagatggaaaagctctttggtatcttgtaaattttggtgtgaatctgggacaatggtaagcaatgatgatgtctattaagataatgataacttgttcaactgtctcagattttagaataaatacattttcacttcatgcatagcaagaaagaaagcaagggggactttaagacaaagccctttgggttgccacatccatctctatttagaagtggaaagtggaaaaaataaatctaacagagaatattgaaaggaaatgcgtcataaaatgggagtaaaatcacgagagtatggtttcacaagaaacaaaatgaaagaaaggaaaaaagaaagtatttaaaggagacagttgtcaattgcatcacaccctgcaaagaggacatttggcgcacactgactcttgggactgactgctctgtttatcaggtatgaatggaaatccatgtgaaatgaactgggagacacggtggcaaggaaggaaaaaaatgcagacaggtctttctggagcttttgctatttaaaaaatagtgacatgaggaaatagtcagtggaggatgtggataaagggtcttcttaatttccatacaggaggtatacacgtacatctatacctagtggaaatggtaccggggagaaagagaaagagcaaagggtttggagagaaacaaggctgggatcccacatctgagaatgtagagcaagattctagatctgcttcctcgaggaataggctgtctgtacaggttggtccctgataaaagcaaggaactccatggcaacagacctgagaatggaggtcctagcagggatgcagttggctgacaaatctgtatgaaaatgagcatgttccttggagtcgctccactttctcaatgacttaagagactgattttatcaacagagtgctagggagagagaggagacatgttgaaggagacaagggaggttattctgggatgagagttagcttaggagctgaaacaggcatgctaggcaggtctaaaccacaatgggagggttgtggtaccgtcccgggagttgtgcttccttccccaacttggaggaacacagggaacttaagcagctgcttttcagagcataaaggagatatgaagttggtttaatcagagctaagtgtcaggcactaatctgaactccttcaaataccctggccacctctgccactgtggctgcgtatgaccatagcgaccatttccacctgagacttagccaacttcatttagcatctcaccaatgggtgtatgtatggtctggattcagcgtcttgtagctttggcttcttgtcctgagttttctctgccaggaggatgttagacactgataaagtagttactggttgttttagcacatacaactcaaaaatatatgactatacgtgggaatgtgtgagctaaagtctgtgaatcaatgtgtcagtcttttgtctttgtttcagtcctaaggactcttcagagctttctggaaggatggagactgctttcttccaccagtgctcaaaccactagtaccgactttctctctctccctgggtgagtcttctggtttctgactcctgtggcctgcctgcaattgcttaatttttttttttaacatcatggtctgtctccatggaattcatggaaaagatcattagcatcaggaattgctctagaaattagaggctttgcggtcaatttctgtgcagcacaaattgtactccatggctgaaagaggtagatgcaaagttgcagaggtgggggtatgaggtagttcttggaggggctactggggggaatgggggtgaatatgatcacattgcatggaattctcaaaagcatgaataaaagtgggttaaaagaaaaaaaatcaatgccctaagatgggattgtagatctctgtgaagaccacactgtggaaccctgctagcaattactagtctatattcgaagcacaaattccaagactttcacctagtggactgcagtgggagtgaagcacaggttgatgggttgggttgagttaggtctttggggtttgaaaaatgtagattctggaaataaaaacatatagaggttgggagtaagccttggaaatagaagctggaatagttaagtcaaccaactgtccactgaaggacaccattgaaagttacacacagtattaaagcataatgacaaggacagccccagactccagagagactccatgaaaaatcttggtacttatgtgtaaaatttttgacagaaaaagaattgggtggtaaggcccatatggagacatccaggtatacagtgtgaaaagattctcctgaaatctctaagaagacaagaaaagcacctctcttttggctagaagaaagaaatctgcccttatgtagacacactgctaattgttacacaatgcaactgtctctcaatgggactcttccttctggattacctgcctgctcctcctccagctctccagggacacagggtggagcataaccagagctgcacaatgcggttccaccaagaggacctacaaccgggagggaatcgtttgtatgctaagagaattacaattgaagagccttactcttacagatctgttttaattgggaaggtcaagggagagactttgaactaggagctggctgaaaataggacttcctctccagcatgttcttatgaaatgcttcacgtttcttgcaagtgctcaacaggtacggtcactaccctcctggaacagaagcctagtaaaggaggtgataaggggtggaggatgggtttgctaaaatactgcacaagagctccaaagattgtgcaggattcagtgtaacgacattagtgtgcaagagtctgaggattgactatccaaggtgtatgtcatggtcaaagcctctccagaagccctggtaggatctggtcactcctccccttaggggctagcatctcaaacctatgattgcctctccttgccagagtcactctcatgcccctgacttccattccctaagactattcccacccccttcctgcccccaaattgcttgcacatgtgcttctgagaagcagaaattacaggtaagttagggtgtcctaagattgctctgggtgccaccactgactccaaagtggttacacaatactctactgaagagtctgggacaagctggaccctcaagagataaaggttgtctcctccttcttcctcctcctcttcttccctcttcacttgaatcagactggttcgcttgaaccagtcaattcagatagggaaaggcaaacagctcttggaggcagaagaataatgcaaattcctcagcagcaagtgtctgtgttccctgccaatgcaaagtcctccacccccagaacccattcttctagagtgggactcagctgcctccttccatggtcatggtctggcctcaggagagctgcatcccctggagggatcaaatcccctcctggggaaatcaaagaggagatcagtaattagtcactggattgtgtcacttggaatacaaggaagaaaggaagaatgagaggaaaaagagtgggaggggaggaggagggaagggaggtgggcaggtgtgaggaatgaggaggaaggcagaagggcagccgtactggatctgacagcttcacatgatgtattttatttaactagcacaatccatttgcaaagctttcacctagtcatacagaaggggatgccaaggcttgtggggtgtggggctggatggggagagagggacagagacagaaagaaatgagagagggagggagggagggagagagagggagggagagagagggagggagagagagagggagggagggagagggggagagagagacagagagagaaggagggagagaggaagggagagagagagggagagagagagagagggagggagggagggagggagggagaggggagagagagagagagagagagagagagagagagagagagagagagaggcagtacatgcatgcggacatgcaggtgttcatgcctctgtgtatacttagtgccagagaagaacagtgggcattgtgttctgttactttctgactcattcccttgaaatggcacttttcattgaatctggggctccattaagctccatgattgtcctgtccacagccctggggttataggtacacctggccacacgtggtttttgacctgggtgtcggggtctatattcaaatcctggtgcctgtgcagctaatactgttacctactatattatctctatagcccctaattaacccattacatgccagagtggcaggtaagagttacaggtgccacaaaaccagccaaacacaaaggtcacacaagaacaaagagtcagatcacagacatcacttggcttctgtttctacagcttgaacttaacttggaggtgccaacaaatgggaagccatcaagtgactgggacatcgacaagcagagaattttcaagctccctctgcttaataaatgatgggaactggacaagcacatatgaaaacatttccatggatgaggacccaaagacttgcagggagtactgactttattggactctgtattgtattgctgccgggtggaggagctctaggtgaggctaagaagagtgaggtgactggttaattatagatgaagtgacattgataggtgataagatcaaactgattctgttgaatatccatattttccatactttgtttctggagagtcctggctaccacccgtccctgacttcctactgagtgttgctcgtgacttcctactgagtgttgctcgtgacttcccagttatatccatggaatagctcattgctcctgtatcccttctgaggttccctgctcacatcgtcacagctcttggcctgttcagctcctttgtaagtctttgtaagttttatatcttctcactgctcccgatgctaacaggcttcaaaggctcacaacatcctaacactaaaaggacccccccttttttaatttaagaagccattatatagcattgactccaagccataccccatttaatcacttaaaactattaacttgttttatgaaatgtgcaaagcaatctaaagagataggtgcaattctttgcctcagttttcagatgaggaagctgggcaaaaagagatagtggtgtgctcatttttcaatctgcatggaaagtacgaagaactagaatctggaacggggagggacttgttattatggagaaagataaagaagagggagggaatgctcagaggtgggattcggagacaggcagtccagttctgcagttggcgctttgaaccttgggaggcatttaatccattccttttatcttgcaactgaaacaataaaacacaacgaacccagtaacttatatagggatgatgtagggtgtagccaacatgatgggcacatgtggaagtcttctcatttttggatccatacgtggctttgtttctaagcaatagtcttttccccactgacccaccgtctcaggttttgttgtgttttatttttattatgtaagtgtgatgtatgtatgcacaggagtgtctgtgcacaggtgcatggagtttttgagacatcatctcttgctgaactgagaatccactgataggctagactggctgcagcaagctcagcttcttttcctccaagtgctggggtaccaatatgcagcaccacatcttgatttatgtgtgctaaggatctgaactctggtcttcacgcttgtgtagcaagcgttttacaaacagagtcatttcctcaagcctcgtctaatgcctctataatggttacccttgagttcttcagttgattcgtacatttatcatcacgcagtagctctccactttatccatgccatggaatagaagccttgggattgggaatgttcaaactccctctggtcacctggggctcagaacagcataatccagtttctggctattcactcattagctgtaaagccacagcatgctgctctaactctctggagtggccaagtggtagatgcgagggtgcctgacaaaccataagaagactataaatcttgttattacagtaatgatggcgattagtcctgttaaaagcacggtgtgctcattccttcagcagagtctgtgaaaccatgacacaaatatagactcagatggtcattgtttctcaaggtgggaggacccagcgctgcgcttgctgctgggaacagaggaggctgggagtaaaaggcttaagaaatgtaaactgtgttcctgtttattaatggctcaagatgagagctttgtggcataaaatggaaaactgtaataacagagaatctggcatccatagaaacatacctctgtaggcctctcttctcctgggcatgggagaatgcggtccccagccctttcataactgctactaatgtagcatcgtgggtgagcggccacctgcattattagagaccaggaactctaaggggcaggagtgtgtgcattttattctctacttgcaaagcaagcagcatggctgacccctgggagacagtggttagagaatgaatggatgaacaaataactgactgttagaccaacttgaattatctccgttttcctttcactcagcagcccatggctgttgaagacactctaagaacagcacacccagtagccctcctaaaatcgtgtgtagaaagtggttgacatcagagaggaggagttggtgcaatttccaggagactgggaattgctttacatcgtgagaaccgacctttggtttcctgatgctctatcacttaacgaacccacaaagtgttgccaccctttcctgtgcaactgagtgcttgccttacttacactagacaaataaagaacaaatcagagttttagatatcaagacatattatattgtcttgcatgtgctttaatccatcctgaagtgtagctgtcagtttccatggagtcccttatttgtaatctgagagccagcttggattgttcaaacctgtgttagcactgtacaggccattaccagattctaaaatagtcaacagtctccagctctctatgtctctgtttccgtctctctctctcatctctctggttgtctctgtctccctgtctctctcaaaacaaagaactgaagagaacaaatgacttagtttaaagccatgattataaaccgtctcctaactccaccggtttgcccagccattctgatccacccctgaactgggggcctttcttcctttgttcttttaatcgttgtttgtttaaatgctttggagtaaggtatcaagtagcctagggtagttttgaacttgctagctatccaaggttgcttttgagttcctaatcctcctgcctctatagactgaaagatgacaagagccaccacatccagccttgtacctctaatctgatgtcactcttgatgtcactcttgactgtcctagatttggatcatgataacgatttccaaagccagataactcaagggccaagaataatttattcatggagagacaatcttggaggaacagggaaggacttgctattactgagaaagataaagaagatggggggggggagctcagttttcagaagaaagtgaaacacagaggtgcagggcacaagcagagaagactgcttcccacttccctttttttttcacgaacttccagaaaagagatggctgaaggaatggagggtggatttggagactactcctctgtgagaggattcactccggctgctgaggggaaataacctacaggataagagagagacagagagaaggcaggagtggggtgggcgagacaaagaggaagacatatggggaggggggtgggaggagatgagtgaggagtagagaacatgctatgggcggcagcaacactgttggaaacataagaaccgcccccggagacgaaatgccagcgtctctgggcagaatcgaaattgtcagcgcacacattcttgctcggagaaatagtcacttttcttttcctttcaagatgacttcctctttcagcctcaataaaaccttctgatagaaactggtggagcttcagccccaccattcttggccccttccctggcatttcagctcagatcccatagcaagggaaattcaagaacaagtaagagcctggatttcatataaactcgcatcttacaagatgagaatggaagaaatgcatctctcccaaaaggacgaggaaaatatcatcgttaatgatcatactttctaaatataattccccactcacttctcagttattaacgccaataggaacagaggcagtgccataaaacaagtaaaattagataataatagcaaagctgactgtgctgtgaacactctcttcaagggccctctgcaaggagctttggtgtgttctcatttaacagataagaagggcagtgtgatacagttagtgttgcctctgcggaacagctggggaaccaagttcacagaggttaggtaactggccacagctctgggttaacaggtgcaggaaccaggatggcgaggagtccctgtggcttctagtcctgtacaaaaggctctaaatcttattttagccaacagttgaatgttaaactctttcctcaccaactttttcttgtacctggtgactggggattgttttaaaacctttcagtccctttaatttcttccttatgctatgtaaacaaattaaggtgatcaaaaactagatgctgcctgatttaaaaaccataaacaatcaacttgtggttaatgatagctgcataaaagagaagaaaaattaagaaggcacatgaccgcataatgtccaccttatataccatatcagacaccactctttttccttaatggctttaaaaagctatgccccgattcagctggtgaccacagtctccatcaggcctgtgacttttgctcaacactgtccgcactctcccgctcccatggttgtgaatgctggggaattcagcttgaatcacaccttcctcttctcagcatgctctcctgagagagctcatcttctctcagctcggcggccgacagccgtgccaactctacactgatgaatctggaagttcacattcatagctgtaggcactgcaaggcaaccgcaggagccggtacagcttcagcttagaatcagctgcatcttgtgtgagaaacaggctccagtgtcaatcgctctccctcatgtgtttccttattagtcatctaagagccggctttgattgttcaagcctgtgttagcagtatataggccattaccagattctaaaatagtcaacgttctccagctatctttgtgacccccaactggtccttgtttcttcacacgtaggatatttaccaaaagcttctcaatctgtctctgtctctctgtgtctgtctgtctttctctctgcaaaaaaaataagccaagccctagagagaataaatgacttgatttaaaactacaaaattaaaatgattagaagccaactcccaagatggttccttgccagtatatcctgttgtctgtgaaaagaacaaggctcttctactgtgatccatcctcatttgtcatctcttctccccagttccactaagatatgttgatagcaacatgaccctctctgtcaagttttgagtttaaatctttggtcatgtgattattcccacttggagaaatatcagcttcttagctatttttattccgcatcctttgaagtctaggatgaggaccactgcctacacgttctccaagcagttccagggctttaacttcagcgatacagacagtccccgcctctatagcacaagagccatgccacccctttgaaacacttcactgtgatctgtctctcacacttttactcaatatgtttgtgtgggcgggctttgcttcctgaactgaacttgacttgtgaagtaaattcgattgtgtcttttctattgtgctgtcttttacactgaggacagctctgggctagagtagatacttcaccatttgtttaaaataaaaagaatcagagaatagaacctgacatcaagtcttcaataatatagaacaccaaaaacccagaggaaatcgagtccataggtaatgtaaagcttaatttcacaattagcttcaattaactcactcattcaagaaacccagaatgggttgctccaagcatcctgctgatgtggagccaaccatccaggcacagaaagagtcatgtatgtaaaggttagtcagagttgtgggtaaaatgagaaaaagtggatggatcccagatgaagtcagttagagacatagtaaaattcaggaactgagagaggtgaatggaggagaaggaggattcaaagaatggcaatgggactcccaactcaggcaaagaaaggagagcatgctgtttctggaggcagagaaaagcagccggcattcatgaggtcttccatgaattttcaagcatcggggtggtgaacagttccgtggttggaactgtgtcagagtttgcagcccccaggccactgaaggtttgtttcatgactgtcaccctgctgaactgcaaagagtttttctcaaaaagcgctcccacaagaggcccaagaggaggacggtgctgctcaggccagcacctggcaagcagactgaatcactgcccagcagagtttgctgaggcaggaagagcgtaaaatgaaccctcctgtcaaagaaaatcaagtctgacctatttgttttcctttatcaagtgaatcaaaagcttagccgagcgaactaaagccaagtctagaaaagagtgtagacagcgccacagagagtagacgcaagatgcaagcttcctctgagacccttaatctctcctcccctccaggtgtgtggtcagctgctgcagcatcctgtggtacgaatcagactcaggttcctgttcaaggctcttcactgagcacagttcaaggaaagggcccaatccttcccactatcagagagtcaaaaaaaaccttcctaattagaaggaagaggaggccccagtctcccagacccattctttccaagcaaacacctctcctgtgatactacaaaggaatcagagaaggtgaatgccttgcttgccaggaagcaacagcactgagctagcgcagagctgaggaagttccatgctctcctgccttcccaggagcctttcctccacagcaccttgttctggtagcataggaaaagggcggtgactggaagagtcccttctgagatctgcgatcaggctgatgggatgcagggaggatggttttctaagtgaagtcatcataggtcctttatcacttgcataaaatgatccaagtgagatgtgatccatttaaagtagagactgggtaagatgattcagtgacgtgtaagagagcacggagaagcttgctacagaatctaggggcaggttaatgagtttagtaaggatggaagtaaagaggagagtgtgacttcacttagggccactgtgcaggaatgagtggtgtctgaccagctgtatacataaaagggatgaagggcagaaaggaattacttccaagtacatgacagcaatgattaggtataagactgtgtgaacactctcacataaaacaaatgctgaaattcaaagccagattttcctatcggtgaatctgcaaaatcaccttcacacatgaaagagagaacatttagtctttacagagggtggtaagctttccactccacaggcacaaatcctgcctttcaattctgtactgcttcatctgtacatggtgccaccccttccctgctgaaccattggctactggcaggttctcggggtgaggcagttattgtcttccattacatacccaacagtgataccaccagactccaatatatagcttcagacctgtagtcacacacacagccctctctggtcaaaatcagtgtgtcataaaagaaaataaaaaagacggaaatgtggttgagggcttcatagcaagaaaggaggatgaaagaggcaagagggagagaatgcacttggaagtactcaattcattatctacaagtatgaaattgtctaagaatggaagttaatgatttaaaaaaaaaaaggtggtgtttaccatgcacggagttctacttaagacaactacaaaacatgaatgagatgttccaatccatcagtaccccacgtatattattagtttgacccatgtgcacgtaagactgcttaaataaataaataaataaataaataaataaataaataaataaataaataaataaaagagggatggacaaaggagtgtgggaatgtgaatttgtatctgctgattttcagagaaggcttcatagaggaggaaacacgtattacatcttagaggacatttctagccatccccagggataaaaagaaagggacattaatgtcagtggctgttgcaagtgtggggagcagtaagactgtttgcttagggggtggtcagccatgtcgtctgtgccatgtgatgatgtgtgctacagaaagcaggccatgtgaaagggtgtgatggttagatgaaataggtcctatccgtaagggcaggctcagatgtcccagaggctagctttgagactctgtgcctcatcttgttcatagaagggaggcaccagagatttggggcaaagtgagatttcctctctagatgcccaagtctctcctatgtgcagcatattcaattgttattcagccaaatgctatgacaccttcctcctccacatttggtttgagaagactactgtattcttgtcccagcctctgtctacaaaagcaaggttcccaggttgatgggttttcagcagcagcttcttggaagaggatcatcaagggttagaccatgcgtttggacttggagtcctttgtgagagaatgaaagccatatttgaggaaattttgagcacatgacacttgcagaagaagttaatttgagttcaacttccaggagcaaggtttttctctctcctatggcacactgctgccaggttaaagcttgccattctcctgccgtgaggctggtgcccgtgcagcagcatgtgtggctcttgcaatctggactaaaggcatgtgctgggaccctgccagccgaggctctgtactgaggactgtgcattgaccttgctcatgtctgctatgtctttcccatcagtgagatcctagtctttacgtatcctgtcaaattcttttcttttttatacacatattcccagttgcttactaatagccagatgactgatttcgacagctgcttcagccaactaagtaggcttcctgctcacagctcagaaggaatggaagccacaaggatctctctctctctctctctctctctctctctctctctctctctctctctctgtgtgtgtgtgtgtgtgtctgtctgtctgtctgtctgtctctgtctgtctgtctcttaaatttctggaaataaataactttggccagaagcgtgtgtcacttccggaactgacagaccagcagactaagcatgtatgacctttacacaagacccagaagacctgggaggctgacttgaatgcagtgtttcctgtcattttccactttcgaatcttaccttcgcggtagaaaaaagagcattccccagccctgccagcccttagacacatacccatcatggtccaccgcacagagagaagagagaggccaggtgagctctctttaagttgatactcaaatacaggtccaggtttccagtggcatttctgagttaccccctttgactgaacgtgcaaatatagatagatgggggtaactgggagatgctctgggcaggttaactatcatgtctttgctacttcctgcatgattcatataataccagcaccaaatggctagcatagcatgaggctcagatcacatcaggcaggaggaccagagcaccagccagggaagggaagtgtaaagagctaggggcattaaagaatggtcacaggccctaagctactaaatccatgagtctatactggtctgagagtgtagtgtggttgctatctgtctttcaaccatctgtgacttccagtgaaaaccttgggtgtgtgtggatataaaatccagaaacgcttataatgccaaatgcataattctgcttgcagagcctgccattaagtcgtgtgtaaaataagaattcgactgtctgcctgtgtaagatatttttctatcaaacctcaagaagccagatgaatattagaatatgctacacaagaaatgcctggctggttccaaaaggagagcaagcactgtaaagcaattaataaatgctatttacgagcggtgattagctcttttcttgtgttgcgttattggtgaggggatgtaggaaaactcatatagccactctgttggaatctcgatttgaaagggaacaagaaccctagattcccaccccttctactcattccacaaagcctaaatcttacaaacgtaaggatcagatgcaaaacttctgcttgtgagggagacgcctgggtacgtggaagtctggctaaaaccaatggcaacgatcacctaatgatgcccctgtggtaagtgcgcctggtggctctgccctggttctctcctacaaatcacagggaactaacaagaacaacgcagcacttttttttcctttgtcttcttatttctttggcgaaacatagcatctccccccaagtctttaatcagacagttggcactcgtctgttctgcaaatgcaatattccttaattgtgtttcttaatacaattacagagctgtgctttggccgcgctggctcacagaaccgtgccaagatcgagcccagtcagagccacaaaagtttaaatgccacacgttacagaagtgcctaccagcccctgccaccgtaggatcagaaccaatgaaactaactgctcaaaaggcagaggcagcagggagaggtagaaggtggacatctcactctctgcactgtggtactcacccactgctcctcactctaaatactattttctctttcttgcatttcagtctacaattccattaaatataataacagcgtagaaatacaaagaacatcttttttttttttcagcacgaaaaaactttcattttaaagcccactgtgtgctccaaaaatttagcaatgcatcaatttctcatcggggccagggcacacatggtactggaagctttaaagttcagtgtcttttctctgtatatgggttgaactaaagactccttaaagccaacccattccgatgcttctgttgccaaccatgctgatagaaactcatctctctgcataaaatagacccacaaatgtcagctgaaggaacgggatgcacgagagaatcaggatttcttctcatgcgataaatgttcacagcttgtaccctttccagaatttgaggttcccaacaccagcaacaattacagtttttggattgaccttcaggagggaagcaaaggaagggattctttcatgaacaccaggtttaaaatccatttaaaatgtcattctaccctgttctgttcatctgggccacacaaatgacagcagagtggttctaagcccctggctgctggaatcaacctccaagccctgatacacatcgtttctgactgagcctgtacccctttctggtccttcggagttagaatttgcgttaggtcaggcccgggttctggacagactctcatcagttttcctgaactcttccatgcaattggcaacaagaaactgaggattcaaaacacagggaggggaaaacggcaaagacagcaggcaaggaagccagcttgtcaacacttccccgaggctgttgactcattaccaggtgataacattttgaaagactcctctagctggaaaactaagaacgctagctgctgatcacagcaaatctcccttgcttagtgtacagtaatgccaccgctccctcaaccaccagcaccccacattatcctactaagagttgtgggttgcaaatcccccgccaactgccccttcccactttgtagcatacagtaggcatcggcccattatcatgactacgaggacagatctgctaaaagctgatcccctagagtccactcaaaacatcccagtattccacttgccccttgcgggttagtttggggactgggcagaaccggggaaggaaacgcttccctaaggattgtgccgccgctagaggccgctctgagccagattctcgcctaaatctgctctgaagggaaatcgcatcagagggaagaggcagcactgagtagcaccgggagtcatggcaacaccatggctcctatttttaaacttgtgggtgagtgagcacaccaagtgtgcgtgtatgtgcgtggggggagggattggggcgcatctcagaggaatatcctcccatatgcttttgagttttcaggggtgaataatctgtgtccagaaggtcatcgaattaaattggaacttgggatggaagaatgtgttctttccttaacttcactaccttggtctcaatcacaaaagatcctttaggtcctaaaggcacacctaaattcctgatagctccagccagcgtcctctttaatgctgatctttgttccttccgcgtgctttgccagcctcttgggtgattcactttgtgttgctagaagagtaagaagtctaagactgcaaattaaagggatctttttgcggatgccccactcctcctgaggccaatcaaagtgcatgctgggtagcatttgcatcgtccagaaccttgaacaagcctcagtatagaaaaaagggtgcagacacccactgcctatgttatcaattaaaccaagtgcaaatggcatctaaaatgcagaaaactggcccaggttggttcagcccgtttcttccccagcagcactcccccacctctgtttccttctggtctgctctccggcagtgtgtatgctttgaacaagtccaaacttatctaacctgtcaaaaatgaacggtggccctggagaacatctgtaaatcaagacagaggtcaaggtcttgcttttgtcttaacacatgtccaacgacaatattttcaatgttcctctgacctttctgagtgccaacagactctagaacagaatgtttgcctcctcctctataggaggaattgcatcggccacctctatgtaaatgccaaatgccgggaccacgtagccataaaggcatctcttataggaggatttaattgaagactgtctgagagaccaaggatttttgaagtagacaatgccagccaatcaggaactgttgtttagaaaaactgctctcttggaaccagtggagcataggtggagggtattaaaggagcttgcagccgtgctcagacgagtttgccactgcacttcttacctgctcccagagtctgtgtcatttactctgtgccacctcacctccaaccccaaggacggggagggtcagcagccagtagtccagggcacaggcaacactctttcatcacaagattctcaggtgtggagtgattgggtatgcttttccatgtatgagataaagaacttgggagcatacagccagagtaagaaagaaacatcatcctttcttgtgtgaaaagaaaggggcccagagcatcatagcaaagtgaacctagatacaaagtggtgtcccctgggatcaatgtagatgtctttaaaacacatttattggatgttgccctcaggctccctctgggtttctcatggtcgagcagaggctagtgcacatatgtgtgcagtgcgtctttatttgtgtatgtatgtatatttatttgtatgtgtgtgcacctgtgttcatttgtgtgagtatatgtttgtgcatgtgtgggggtgtgttcatttactgagtgtgggcacatacacacagagatcagagaatattcttggttgtcagctctcaccaccttgcttgaggcatagtctcttgttccctgctatatatgtcaggatagctggcctgagattttccaggggttcccctgggtccaccttttatcccaacaaaggaatgctggaattacagacccccactgccactcccagccttgtgtgagttatcggtactgcaagtactttacacaccaaaccacctgcccagcctaaggaagaaattcttgattctgagccactctgtcctgcgagttaatgctatgatcttcacaatcaaagtccttcacatttgagtcagtactgagggaaaggaagtggtccaaggtgggtcgacatccgggggcccactgcctctgagatttgtacagtgtgggctggaaatgggatcccacctgcaagtcaaatgtaaatgtaacccactctgtttgaactccatttttctaacctgagaaaatacggaggcaataatgctctaggctatactctccagattaaatgatgctgcacagaacacttggcacatagtagtcattcaataacccttaaaaaaataattttactaaattgctgaagcttagtgttttcaagtcccaagcctccttttttttgttcctgattataggaagtcttttaatggaaattttataaaggtaagatagagctcttgggctcctgaaatcaaggctaatcaatataatttaagtttccattgatgacttcacaatgactatgctgttttgctacatggagatcatttatacttctgggcagtgtttgagattttccccagtagccttcctgtggtgcttctcaaggtcttctgctgggtttccctaatgctgtcccatttcaacagtcctttgttaatgctgtcagctgcctacctgatccctgtcaccgtttgtgtgattcctaagctgttgtgttctgaagagtcacatgagcaagtatgtcagagactactcattgcctaacaaaaatatgttcttgatgttctccagttcacagaacttgattttttttaaacctgggcacattgctgtccaggttagaagctgaacttttcagttgtcattgcagctctttgtgagtacagaatgatttctggccaataatgtctaagtcgagtgtggtatcattaggactcccctaaaaagaaaaacctttccttttgagaaagccttctgctttctcatattaactttattggttgcttcttgagttttggctgccatcttgggcagaatgatgtaggccacacccagaagggaactagcaggaagtgggtccggggagtcacatagctcctgtgcagctcctgaatgctgtcaagattttgtttaaattaggttacagatattgttcacagcttcctttgaaacacagaaaacttgactaggttgactctgagttaaaacaatccctataaacttggtttcagtggcgttagttcagggtgcttgttttctttcctcgttggctatgcaacaggagaggttggtgagtatgtgaccccattgccgcgaatagaaaagcaggtctatgtgtgaagacatgtgacatatggtgccagaggaatgcagatgatggtcctgtgcagcctgtggagtcagtattttaactaatagtctacagcacactcatgtacaacacacacacacactattttattttttctctatataggcaataataagtagaaatttgtcccactattcaatctatgtaataattaagtacgttctgatagccttctattgtgctatgtttccttaagcaaagtacctggcagacttttgttcaaagagaagaaaagagagagagagaaaaactgtgttgggagtgcctggataaaagaagaggaagcagctgacttctccctgtcgatggccattgcccatacgcaccaggcttgttgccatggttacgtgaggtgatacacatgtcaattgcccgcatgaaaatgctcacttctcttctcatatttcctaggcacgataatgaacaacttgcagtttttgaccatcagttttgtgacatgggtcagatgatgaccagtgtctcctgacatacaacctcatggaccttctacttgtaatctcttgtcataaagatgtccactccatgcaaaatgagcatgttactggcacagcatgacttctgtggctattttattgttttgtccagggagaatgtgacttaagtaaaataagacatttatgccttgtcaaaaatgtgtaacgtcatttgactgctaagccttcttgcttccctccattttggtactgaactcaggtccttgtgtgtactaggcaaatgttctactactgatctgtatatccccaaaccaagtctcttctttctttgaccaaacacaaaagccttcattttcccaactgccattcttatccccatcaagacttaaaagctagaaatcaccaaagattcattggggtgagagtgaattatattttaaagggttcctatcccacagtcaatacagacttagcaataggaagaactaggtaaacaattcttcctattttatccacctctcttgatgatgctcaactttattggacacatgcacacacaggctctcattgcatatgcaatattcactaaatgactccaggtaagtgcatgcaagaactatacataaggttgctggtggatacagaaaactgtcaaagctcttcaatgaaaaccagctgaaaagagaaggccagtcaaagatcaatgaacacaacactatcctggaaagaaaaaaagaagacgggaggagagggggtgggcatgaagcaataatgaatggggagatgcagccggagcagagcagtgagagatctgtgggcagcccctggccggctgctgacactggaagctggacaagaaggaacagacttcagcagcagggagctctaatctgtcagctgcagttcctccatgtgtgaccagccttcccagcttggggacaggtgccagtctgggtatgttcaccactccagacactgccacaagatagtatgccactggaaaaaccttgaaagcccaagataggtttcttgtgtgtagcaggtacctccaacctactcctccttggtttctacccaaggactatatacagtgccacttcagacaccttagcagccatgctgagtgtccactttttccaaatccatattgggcatctcatgtactagtgatctgtctctaggatgtgaccacctatgccccactgtctgtgtcaccagagaggaagtccgaaaccactgtttatctaaaacacaagatcttatatggctgcaaaggccatatgcttaccactgctctcaagacaccaaggtttgcccagataaccatgaccagctggggtccaagcccttactaagatttccagatcatgtctataatcataaatgacagtcctctagcttcctggaaacccccaccctttattctctggtgggaagagagtgcagacagaaaaacaactcccactcaacctctaaataatgccaacttcagctctcattaaatgtgaatctttgccttagtctgggttaagaagcaaaggagaggcaagagttttatagatgcagtcaggtcagggctaaagttaacagccagccctgggctccctggttaacactgccccagccatcagggcccttgggtttcaggcctgccagcctctaacagataagtaacctctgcaaatctcttctcagattcacaagattcttctttgcatcattccctaggaagacaagggtggagagggattgggttagatgagcaccagccgtgcaaaggggtgggggggcaggcctttccccaaaatttcattctgtgccacacaggagtggctgtgtcgcaggttcacacacagatgcagcccaggtctgacaaggtccctgagattcaggtttcttaaaaatacatggtgataaaaaaaaaaaatcccagcactcaggaggtggaagcaggtgggtaactatgaatttgaggccactttgttctacacagtaagttctaggccagctagtttgctatttgtgctctccctctccctctccctctcctccctctcctccctctccctctccctctccctctcttccctctcctccctctcctccctctccctctccctctccctctccctctccctctccctctccacctctccatctcccccaccctccctctctccttcctttccctctccccctcccctccctccctctatcccttctctctctttctttctctccctctctcctccttcagcctctccatctccctctccctgttactcccctctccctccccctctctctccctctccttctccctttctctccctttttgtccctctgtttctctctgtgtgtttctctctatgtgtttctctctctctctctctctctctctctctctctctctctctctctctctctctctctctctccaagttgcttactatctttttttccatgctcttacctaacgtacattcaccaactatctgcttatcatctattctaggaatataagcattaattaatgataaaatatttggagatcgaaatggtctgggaggagaaagttaggaaaacctgtaaagacgaactgtagttagctgtttgttgtgtgtcatagagggaagtagagcaatagaaagggacaggaatggttagaagggtgagaaggacaggttacacctttaaacatggtgaccagtggatgtctcttgagaacatttgcatcagaacttttgcaaatgttcaataatgtgattcctcctattgcctggctggtgactactgtgtttcaatgtgtacaggataccttccttttaaatctatctcactggttccaaccccatgatttcagagatgaagtctcttctgccaagtgagatctgcttaatcctcctctctctgcttttttctctccaagaggattgtattccttcccatagacagggtgccactgtatcttcctacaggcatgcaatgtccttgcttagttaatgcttgtcttaccttcctcttcattctaatcctcttatatgtcactttttaaagaaagagaaaggacagaaggaagcaagaaatggaggaggaagagaaaaaaattccacctatgccatgggtaaattttaaatcttgcaaatcagacccagaataaaatatgatcaaagaaataattatgtaagggtctcaacattgagcattagtgaatagctatgaagaaaaacccaatcacgtggggttggagaaactgctcagtggttcagggcaatctttctacggcacaggagtggagtttgttcctagcgtccatgtcagctggctcacaactttctggaactccagcgccaagggatctgatgcccccttctggcttccttgggcactgcactcatgcatatacccacatgtcgacacacatacaatctcatgattaattggtttttttttttaaagaatcagctgactggaattagtgtatgtaatattagagaaagtagaccagagcaaataacaatttaaacaaccctcaaatcttattattgttcatgtctgctttgttatgcttgcaaaattctcattgaatacatattttagtatagttagtatatccttcagtcctgtttccagtttccatgccctcttaaaaccactgagtggatagagtctctcttccagtatacacaggtagcacttgcttttcaaaacagtttatatgaaagagctttctatagatcctttagtggctttgtctgacaaggtaaggacgactacagcaggtccttaacttacaaaatacatgttcacataacctttcacctggtaaacaagtagactggatggaggtatataaactgaatacacatgtctgccttactgtaaatctgcctacgcttggtgcttagtggacatttaatagcaaagcagatggaaacgaccactcagctcttgctcatacgatctaaatctaactcttttaattctttgtttatttcttaagctcccagcattttccaggccaagagagtcaagtgggcatcccatgagagcagccagctgacgcagtggttccaaaccgggaataggcctcaaggttgcaggaagattatattcatcacagctcagttactaaggatctaacaatgcccctttcttcatatctctattcttccatagccaggctgggaagggtctgatccttctgagatgaaatcattcactcagaaggaataatgtagggtgagtgcaaaaccagaatggaataaaaccagcatgggagacactggggcgcagggggagatcgttaggcaagactcataagaggacggctatattaagatccatctttctcaagtagcatctgctcttcctccaagttccatccgctgctgagcagagagagcagaaacactaagttttggggattttaaaagaacccagaagtacatggcaggttcaccatcacccgaatgacagaaaggacccaacagagtattagcccacatattgagaaggaaaatagccatgagttctccctgggaagggtaaaggaagaaatgtagacctgtgctcactagtaccttaatctccttctctagctatgtgacaacggagctagacatatcttaaaaatatttcagataatatgctatcaaaagattggtagatgtttctcagtagaggagccttcactagccacaagaaattctccagctctttccatcaaatgaagttcccagttggaatcaatccctctcagcatgctctgcattgtggcagggcattgtactgtatttattaataaggcataaatggatgtgacacggttccaaagtaaattagttcttattaatgtacaaattagagctcttagattagcaagtaaaaaacaggagcctcgttaaacttgaatttcctatgaataacaaatattatttctgcagatggaaaccctgtgcagtaggggagatggactcacaccaagacttatgttccttgtttatgcagaggtcagagtccactgagctctgttttgtttctttgtttgtgtcatttgtaatctttgagacagagtctccctagacaagacttggttgtccacaaacaatcctcctcttttacactcctgacttctggaattcaatacatggaccagtgcacttggtctgtatgtgtcgttaggcaagtagatggtagacagatggagaaaagaagtgaggagagaggagagaacagaagaggagagaacagaggggagaggggagaagggagaggggaagggggagggaagaggggcgaggggaggggagggggggaggggaggggaggggaggggaggggaggggaggggaggggaggggaggggaggggaggggagaggagaggagaggagaggagaggagaggagagagaagagtgaagctctccaatcaacctagagtctctccagacataatcaccagatctccagctagtcaagcttcaaggtttaaactgatacttgatataaaccatttatatgataatgatctgaaattatgcaagggtcctctcggaggatcattttttaagacgtctttgggttgctaaacaagtgactcataagtacgtatctgtctttgagactcaagcccattaatcttcctccaaccccctccccatgtgtgtgtggtgtgtgtgtgtgtgtgtgtgtacatgtccatgcatatgtacttgtatgtacaggtatgtatgtacatacttatattcatgtgtagagccgaaaggtcaacatcagttgtcttcctctgtcatccactaagtgtttgtttgtttgtttgtttgtttgtttgtttcgttttgttttgttttatgatagggtctcatactggatttgggtctcagtgacttgacatgactgactggcccataagccacaagggttctcttgccgctgccttcccagagttaagattataggcacatatcatcatgtctggccttcctcatgcgtgttagggatgcaaatttgcaccttactgaatgagccatctccctggttcttcgtataatcttttatcctggttcctgaaggaacttgacacgcatgagaagaaagccctgattcagtggatgtaaataggtgctcaatctcctctcgatatttctggaaggacagaacttgggggtaagagaagcccccttcctgctccccattcctaatgtcctctagtgtctgggccactcttggaattctccagaggagcctacctctctgggctgtggtcaaggaaaggaacagcctgccaaagggaccttctttgtcataaaacagccaaccctttgcagctattttatttgcaaagatttcctgctgtggctaaatagtgcagctgcttgggttgttatttaaaagagtgaccctaatgagaccagagctctgttgagggccaagtcttatttcagagagtgagaattgccaagacaaagagtgcctaattgagtcccagggaggtctccagaagtccatgcctggtgacagtacctcaggcctggggagaccactttataagtcccagctagataacacaagcctttctgagctcacttaaaataatctactaaaataaccccatcagaggctgcagattggagccaaagagtccctaaagctgtgcttgacatgagagggaaaggggagaggatggagaggaggaaaagatgcaacaatagagaggagcagagaccaggaaccggtgcctagctgtcaggtagctacttacagggagggatatcaggagctgaggtgagagagcatattcaccaggtagagaggtggggagagcatgcagaagctactcttgatggtgatggtggagcctgcaggccgtgctctctctcctccctggagcctgcaactgtgtgaacaatctgcacattgcagcccctgcccttatgcttccggtcagctacacccaagacaatggaagggaacatctgtggctcaatgtgttgattttcttctgagggtggggtggctttttttttaaacacagggtcttcatatactgtgtacaggctgatctgaaggccactgtgttgccaaagttgacctcgaacaggtcactcttagctcagagttaacactcctgtagggtgacatgcgctcctagtgacttaaatataaggagagggtaaaggagagctggggagagcaacctcttcgtggacctcacagggccgctcaaacccaagagattctggacaaaggttaaactaatgatggtctcggggatgtgtggaaaggggccctggttctagaggtgacatttacactctggtagaagataagctaagccagaaataatatacctgaaggttgccgtttaccctaggggaaggtttaagagaaaagcgggcgagcgggcaagcttgaactgcgtttagaggcttagcgttctgttcccttcccttgatttgtgctgtttgacagatgttttggtctcagtagtccttggcctttggctttggttttaatcaacaaattcttgggaagctgacatgaataagatttgaattgaacactaaaaataacagaaaagtgcatgggtctgcggaaccgactcagcaggaaggttttcccacctcagagagaacagcaagacaggctgccctcctctacagtgtggacaagcactgagtcctggaggacctcgctcacatccttccccatgtcacacactgtgctagaataaggacagagagacgggaaaggacagaaagctgctgcttgctgtcatggagcatttttggaaggcaccttaattaggaaagcattagatttagtgaactcttgtaattgggggatgccagtccaaggcttacaagtaactaacttcagggtgccagttaagacaaacggaggcctagcaatgactagcacagggtaagcaaaggagtatctgtttgtgtttgctggtggcaaggggcatgcaagtgcgtggagggctagagatgtagctttggggcagtgtgcttgcttagcatgattgaagccctggacttgatccccagcaccacatacacatagctggatgtggtgatgtatagctgtaatactagcacaggggctgggtcatcaggtgtttaaatcatcatccctggactatgctacaaattccagcctggggcgcatgatgagacacagtgacagaaagggagttgcacgcgagagcgaccctagtgttttttatgttttttttttcctttctttctttcttttttttttttttccaagacagggtttctctgtgtagccctggttgtcctggaactccctctgtagaccaggttggcttcagactcagaaacctgcctgccttttcttcccaagtgctgggattaaaggcattcgccaccactgcctggcagcccctagtgtactaaaaaacaaacaaaaacaaaaacaaaagcaaaaaacaaaaaagtaaagtattcaatgctttgggaaggtcatgttggagggagagcaggcatgagatggttttgcagagacaggcagagcccatgctgtgtaaaactttataaaccatattaaggagactcttccttattagagcagcaataaaaaagctactagaaagcattaaacaggcgggcgatgaaatcgcgtttgattgtagatcactctggttgcagcatggattgcaaagaagcagagctggctccagggagagcagtcaagaggcctgcagcagcagtgtagggaagaagatgggtgggtgtggggtgcagtgggaaagaggaccacacagccaaggcattccagaaagacttgaacccacaaagaacagcccactggctgtgagctatcagggacacaaaggactgaggagatcttgggaattttaatttcattaatcctctaataggatgcatctcagacagaataaatttggttaggaatctgggaatgggaaagtcgtcggaccggttcagatttggagacatggcttcccagtgcctgtggtatcaaaagaaatgtcttttctggttgaaaacacaagctgggagccaggcctggtagaacaggcctgtaatcccagctacccaggaggctggtatggaacaattacaagttcaaggctgtctaggctgcagagagaattcaaagccagtataggcaacttagtcagacccagaatcaaaattaaaaaaaaaaagtgtgtgtgtgtgtgtgtgtgtgtgtgtgtgtgtgtgtgtgtgtgtgtgtgtgccaagcctatagctctgtggtatagcacagaactaacacacacatacagggccctaggttcaattcttagtacaaaaaaaaaaaaaaaaaaggaacccggggctagggtgtgatcagagatgtaacctcagagaatatgcagatattgagtcagtgaccattagttcagaattaaacagccaataaagctgtttttcattttaactctagattaagagctttgcttagagactatagatcaacctccctcccgagattaaacagagctaactcatgggaaccctgagcaaaggtgttttaagtttctcagactacactctagccttttgggagctagatggtgggtactcgaggattcagggtttctggagaacattctttatgtcctatttaaatagctcaaaataaatctttacatggatgtgttcaaagcatgctgctgtacaaaagaaagtcatctattgaacagcaggccatagttccacatgtgtaaaagtgtatacttaaacccatatagatacaaatgtgtagcaagatatcgagggtggttcctaactaacttaattatatatggttagttgaatcatacataattcaggttagcttaattttcttcttagtgttcggttttgtttggatctgcacagcctacatagaggacgactttacaaaaacacaaaaatcacaaaggaatggtataagagcccctcatgctgtcagtcaacttccagaagggcgtggcccagtcatggttgcctcaaatgagtcgaggttaggatcacagcatcacagcattccacaggtgaagttctggatgtgaggcatcctccctggggctcacattatcaatgcctggtgcccagttgacggaactattttagaatgtgggaagagctttggaaggtggaattaggtgactgagggcaactctttgaaggatatacctggtatctctttgtttctctctgttttatgcatcctgtgaggtaaactgccttcctcaccacatactcccaaccctggtgtcttccttcttcatgggcagaagccacaagcctgtcaatcatgaaccgatgcctcaaaaaccacgggccaggatgtcgtcgtccctccttttaagttgttcccttctagtgttttctcggagcaaagaaagggagtgggggattgaaacagagtcttggccttgctacgaactagactaaaaggaacatctcctgagcacgctgactcatgaagacagacagataaggagcaaagataaggaggccatgtctgtttctacacaagctaatggaggctgttctccacttcctcccactacagcaactttccaaaggaagttgactcctcttgtcccttttgtcaaagcctactaactatggtgatcaaaaacactcagggatcagagaggcctgggctcggtcccaagttgacctgctcacagtttggttgaagacaatctgtgtctataagccttattctcatatattataaaatggatatgatttttttttaaaaaaaccctgactgatgggattgggagatagagggaaaatatgaaaactcttacagcaacatttagcacatagttggtactcaataaatgaggcctgatttcctctgtgtgtgtgtgagagagagagagagaatgtatgtatacatgtgtatgcatgtatatatatgagtttgtatatgttcacatgtgagcatgtgtatgtatatatgagtttgtatctgtgcatgtgtgtatgcatgtgtgtatatgcacggggatgaaagatacagggttttacataccccaggctgccttagttgcatgcaaatgacaactatgaacttctgatcctcctgccgtcccatgaactggaattgcatatgtgtaccaccacaccaagtgtggggatagaacccagagctttgtgtgtgccaggcaagcataccaattgatttgctattttttagaataagaacacaaaagagcaatatttaactacatgctccccaccaccaccacgaccaaacaccattttaaggccagctttcagtctgctgccattctgaacgaccaatccctgctcttgcctttggaccacctccaagccccgccttcgaggctctctcctgacccccaccaggagcccaagcaggacagttccacactcacctattcagcatgttagactggtagatcctcttctcgtgggtgttgtagcaactgctcttgggctcagggatgaaactgtgttcggacagcatgtccgaggcagcagtggtgatgatggcaatcccatctctcactctggcaggaaggccatagtcccattcgtcatatgacacagagatgagccccgtggggaactctgaaggcaccgtgtccgtatcccccgccaccagactcggcacgatccatgtgtagccgtagccagtcagcccaactgagttagctacttcgaagatgtaggtggcttcttcctttgtgcagtagaggagaatgatggggctctgcagcttcttcagctgattctggatcttagagtcgccatcgtctagagacatgtctagcaggaggacttcctcgagctcccagcccacaaagctgttctcaatagtgctgcggatcttgttcacgaagtcctggtagccggggaagtaggtggtgacgatggagaagatgtaccagtcgtattcttccatgatgttgagcatgacagaagcttgctgttcaatggatgggccaaactggaagaacatggaggactcatcctagagtagtcaaaatacaagagaaaggggagaaatggaaaaaagaaatcaaacagatagccacagggattgtgaatcaagtggatgcaaaagttcatgctcattgttttttcctcatagatattttattttcaaaattttcagtggaaaaagatgtttttgaattttggtgtaaggacattcatctacaatgtacctgatgcttagctatggaaaccaatgatagcatatacctgttagtaacagcgcccacatagtactggagaatgaagccaaggtctcatatgctatgctttaccactgagtctatatactcactgccccccacccccactgttcattaaaaatgatgtaggctctcactaggctggacttaagctcactctagtcactctgtagtctcaggagacttttgcttggaatcctcctgctttgggtttctgaatagcagaaatattacttgcattctcttttaacttagcttattctctagtggttgttctgataataagatctacaacttagagtgagctcaagctacacctccaagccacacatgaaagtacttgtagctagactgtatatgtggctgtgcttgattttagagaaaccaacacaagagggtttgctttctaacccatagagtgtcatgggtcttagactgatctgtgtaacacataggcacatatgtgcacatgtgctcacacacatgtatacacacacagataattctgaacatgtttttctccctgtccttttgagggagaagccatttgaaatttctctcattgtaagctccatttcacctgctgctttgagaagttgaaacctggtattttggctcaactgtacagctacaagaatctgaaagcacaaaatgaataccctctcagcctcagcctctctccattcatttcctcctgatttgttcctggtaatggtgtcacttctcttaatctatgttctcaccttacatccgagagcctctgtccattttgaaatagtctaggctaacacaattatatccctcttcaagggacatttcttcctccgacccccaaaacccaggctttaaagtatagttacaagagaccaagaaattggacctctaagcaaaattatatagagatttcttaacccaggaataaatagccaagaaacacgaagtatttcttgaatgccagctattgaaaaaaaatacagactgggaaatatcctacttgtatctcaaggctgtagctgggcagtgagagctgccatcccctaggctttccagagtgacatgtgattcttctcatgcttggactggtcacattaaccccagcctacccagagtagaagatatgtttatctactgggtggtgaatctttctgctaatggagccatgttgcttttcatgcttgtcccaactgagcttaacagagatgagccccaaaagactacagaagtcaaaaacatagggaagatgaagcagcaacaatagatagaaagaggaatgggaattacttcagagtagaataattaaaggcagtgtgtgtgcccattctgaactttggctagaccttcctcctggatctcctttatgatacaaggagtattcttcaagctaaagtagccagtcttccattgaacgttacagctgtgatgtggactaagtactgtctcttcctgttaataaattctataaccaccagggtgaaggtagtaagatgtgttgtcttttgagagatgataggtcttataggggaaaagctcagaaatggattaatgtccttttaaaggagactccagagagctgccttgacccttccaccttgagtggacacaaagaatatctgcctctacaaactgaagagggagtcttcactagacaccagacctgctagcaccaatgatctttgactcgtcagccttcagaactatgaaaactaaacttgtgttgttgataagctgtctcttttatgacatttttttaaatagcagcttaaaatgactaagacaagtgggtatctgagacaatgaagcttaattattccaatgcttgtcagggacctgcagagaatcacaagggaaaaaagatagaaaagaaagcccgttgacagaacaactcattttgactagacgctgctgaaagagatatctgcttgattttcttgtaaacatggtcttggagattctcacatgggaaatctcatcctgtgagtttccacaagcccaatggttacacaaagtgaaaatgctttcaatatactttaaggtgtacaggacttagggagaaggaaatctcaattgcaaatgaaataaatcaacctgttctgtgatgggtgaacagaatttaatcacaaggagactcttgagtgcacacgaagccccacatatggtgaggccataattggctcaaatgcacagcaagaatcagctttggggaaaaactcatggttgtctatctcagacggtcaatgttaatgagattgaacttaaagaatgaaaaaaatctgctaaacagcatcttgaccctctctcccttttgtttctcctaatgcctctccaacagttacaaatggctattctgcaaagaaaactaatctacaatgagcatgagacactctgagcataccttcgaatgccctgatcatatacaacccctcttctatacagccctcagcatgctcaccttacccattttgtattgccaggcctcaattcaatgagtatgccttctacagccattttatttgccaccaaaccaagtctgttgaagccaagtagaaaccaagagacagttatggcttgagcaaaggcttcctgtataatgaggagtgtagtgttgtttatttagttgatgcaacagtctggtgtacagtggtccggaatagaatagctctttttttcccaacaaagctttgagctaactctaagttgcaaatggtgacaggttttgcaaattacggtctctgccacaaatcaaagcataatcttcatatgtgcacggagtggaaagccctggtggccacacatctatctttccaggcacccagcatgcgctacgatcacccactagtgatcaagatgaaggacagagacataattctgtttgcagttcactgtgattccccgtgaacaattttatcttctaatgctattacaaaatgttgacactcagggatccttggagaagccacctccctccagtgaaaattcccagccaaatttattgcatgaatgcacttcaacttgccttaagagcatcttgaaagtcttcctgcataaaaggctgccttaactgagatgagcaattagcacaggggaggtagaattgtacattagaccccatcagtctacaacctttatgctgtacttccattacattgatggttgtggtgtttatttgctaataagaaaaaaataaaaagattttttttccattccattatctgccacagaaaacagttgcctaaagaattaggagcacatgatgtttttcatcatccagatcccctactgatcgtcttccaaattaaagaaataactatcccagtgaccacagtgcccctggtaacagacgtcatctcagttccctgcctccaacacacacacacacacacacacacacacacacacacacacacaccagatgaaacaagccattcatctaagaatgtctcttccttggatacagaaccctcccggcatgattggctgtcaaggtgttataaagtcctgctctgtttgctctaaagctaggcagctctgaagggtctgtctagcttcttaattccctacaaggttagtagagtgctgttacaactgcattgcccgtacctcctcgtctgctcagtctagtttccactgcctgtacctttcttagtgttgatgtcagttccctcctccctcaagcttcaccctgccttcacactcagcctgctctctgtggatcctgactccattttcctccattataagcatggagaagggtgtcttaaaggtatgaacagaagggctgggaagatggctcagttggtaaagcgactaccttagtagcatggggaacctgtgtttgggtctccagcatccatactttgaaaaagaaatgctgagcgtggttgtatctggctgtaaccctaactcagtgatataagagacaagcaggtccctgaagttcactggtcggccatttttgccaatttttaagcaccatgtacaacaaaagaccctttctcaaaagacaaggtgaactatgatggaggaagacaccaaatatggagctctggactttatgtacccatgtacaaacattcacacccatgtggatacacacacaacacacacacacacacacacacacacacacacacacacacacacacacacaaaacacataaataaaaataaaaaggaaatattttaatgttatacttacgttcataaattatggtcatttatgcagtagaaagataatcctctgttctttgactagagatgtcataactagggtgaagcggggtcagctgaatatcagaaatgcattgatggaatgagcctcacaaggtagtgagctctccatcaccctaagaaacaggagcttcattcttatctgatgaagggttcttttccctcgctctatctatcttcattcctccctctaagacccagatcatgggctgttcctttgatacatggtatcttttttactctcaaggggaggttaatcctcatctcctgtgccttttaaactgtgcatttctgtctctaacctacctaccacatgatagcaagcagatttatctcttctctctagcaatgtgggttttctatatgtgtgtgcacatagtatgtggtgtgtttatgtacctacatacatcatgcaatgtacctatatacatgcacataaatgtacctctgcacacgtgtagaggccagtggtgtcttccttgatcatcctccttggtagtttgaataagaatggccaagtaggcatataccttttcatatttggttaccaagccaaggagtggctctgcttgaaagtattagaaagattaggaggtgtggacttgttggaaacagtgggtgactgaagcttggctttgaggtttcaaaagcccatgccaacccagttcctgtctgtctacctgtctgcctgccgcccctccccattttcctctctggttacagatcagaatgcagctctcagctactgccgccatgtcgccgtgtttcctgtcatgatgataatgggctaaacatctgaaactgcgactaactgccatataaatgttttatatagttgctttggtcatggtatctcttcacagcaatagaacaatgactaagacagaagtgccactttttttttcttcctgagacagtgtcccattgaacctaaagctcactgattgtctagactgactgagctgtcccaggaatccacctatcttcacccctgactcagtgccaggtttacagaggcttgtggccatgcccagttttttttacaagagtattgggtactcaaacccaggtcctagtacaggtttcttactgactggctcaccttcccaccctcaaatgtctttatttatctctaaaactataaacagcacacagggggaaaaagctctgtgtgctcactattgttacaaagaaacttgattgaatgggtggaaagttggcagaaaatatcttgatgacatcatgaagtttcctacgctgatggtgcaaatcaccaccatgaaaatgggctgtgcctacaatggtacatgtaacctgcactctaagaagaggagagcagaccctcttctgtcgtaggcagtcatgttggcagagagtactaccagcacattgacacactcccattgctgaaaacattgagcaactcatctttgcacacctcctctaacccccttcctctcattctgttctttcataaagaagcagggtgattcttatagaatataaatcagtcatgctactctctgccttagccctccatggcttcctgattcactaaacaaagcagccaatccacttggcgtctcctttatccagcacatcctatgtcctcataccccacctccccactctccacctgaaactatcctgcttcccaggtatccacagggttaacacacatatctgctaaaaccatgccttctctggtcagggggtgtggctttggataaagcacttgtttgctgacacatgcatacaacacacacacacacacacacacacacacacacacacacataacacatagaagtaaataaacaaataaacaaaatcttgctttctcagatgctgcaagcatataattctcaaatctattactagctttctttcttgagtacttctttagtatcttaacatcttttgcattattctttttttattagatattttcttcatttacaattcaaatgctatcccaaaagtcccttacaccctccccgcccctttgtaatatcatcggaaaaatggttctgcagggcatttgagtcatttcatatcaaaacaaacaaaaattttcctctgttctccccaagtcattctccttaaaatttcaattagtgtgtattaattgtacaaagtaatgggtttcgttatgatatttgcatttaagttcatcatatccttgactcatagccacccattcaagtctcactctccacccctccctgtccctttccttctctttgactttcatggcctttcatatattttcatctggattccacaggggagagggagtgtgtggtcattgtctttctgagtctagcttatcttgagtcacacaacagcctccaggtccatctcactatcagcaacatctcatgcttctttatggcacacagactggttccaacatctagctcctgtgaacagtgccacaacagtcgtggacgctcaactgtctgcttctcacttgggattcctgtagctatgcatacaagtgggtagcagaattggaacagaagacagttctagttttagttttctaaggagctttctcatggatttccacaggggctacactcatttacatcctcaccaatagtcttagagggttcccttggagagaactccatctcgctgaaagtctggatcttctgggcttttcctgacaactcttcagctcaccagatttgaaagaaagaataagacagtgggacaagaatacaggctatgaaagaattcctgggtatccctttgtgtttcttctacatttacagaaaagtagaagttacatgagggatagaatcgttccttccatgctaaagggaagatttcctctctacctggacagcaagaaacccctagctctgcagaaggcccaccctcagaccatgctaccatttcatctctactcaccaaggctgcagttgcctacctaagatgagtttgtatggtgccagttttgtgtgcaatgccttaaaatacagggacatctgatcttctccagtgtcaccattagctggaaatgccacaacagaagtatagaacagaaacttctggattgagaatctggagttttcccccctgtcaaatgtcagattcattttctttaaagccccacacataaaggagaacactgaatgtcgaaaggtctacaaacataacacccagtagctcagttgggctcctttaagagccaccccaagttgttaaatcccttccacagaagctagcattttttgctcttccaaagataagtttactccctcctggaattttgttccactctcctccctggtgggcattcttggtttcgtgatcctctaaatgtaaactgggaaacaccttaaagatatttactctgagaatgtctttccagtccctcatgaactctaggtcttggatagctgtataccaagaaggaccctgggaggaataaggggggagattgcaaattctgatccccattcctacttggacacccagctgagctcctgccctgctgtcagagcaaagggctggggaacaggaagagaaaggaagagaactgcagcaatgtgttcctgctctgtgatgtacccgggctgtcaaaatcttaacaagcctattacatttcatcgtaaattaaaattcctctctatggcctactccgttccacagatcaaaacagttctctgatgggctgtagttccgttaagaggcctcttttctacaaaaaagcaagctgacgagccccggcaacaaccaggctctgtgatggatgagatacagctttttcagttgagagtttcatacatgcatctaatgtgttttgatcaaatctacttcatcctccctacagctcctccccatcctccagtagatcctctccatcctgtgtacctcttatccctcccaacgtcagcctacccctagcttagatgccttagatgcatcttagctttgaggtaatagatgcacttttaaatagatggggagtgcagagagagtggttgagaagtattttaagaaacaaggtgagcaaaaacagcgtaaatattaaactaacattaattagatagtaaagttatcagtaatcagactcaatttattgagacaaatcaatataaaatcaaatgtgtcccatatttatcccagtgtagatatgggtgggcatagacaggatattaagaaagttacataaatccaaaacctaattactaagagggaaatcaacttccctcttattaaatatgaaaccccaaacttacatgctatcagaatctcctcattgaacttaagccaagcaggtagcatctctggatttatgattgctgttaaagagtggggtcaagtacaagccagtgggatccctgacatgcaagggacaattttcagagtaaatatgtcggcatttgtctccaacaaattgccattccctgctcctcgtgagtgtttgatcagaacaccacgttcccacacggaggggagtggggagagcaaggccccaaagaatagaaaggttttccaccatcttatttgattaagctgtgagtggccctgcttcctgtgtggccaacgaaaaagaaagcccgggttctagatatagtcactatatttgtccccatgggtctctttacggattgctggaaaacagggcactctttgtcccctggttgctccatatggagagagcagagccacaaggcatggctggctcttgaatgcggatcaaccacacttatttagcaccaattaacaagccactgtctccaatggctaaatccagcaagaagtttaatgagaaagtttttcttttctttccccctcactaaacatcagtgattgatttcgccatgtctctggtttggaaaatagattgctcgttcactgaggacagtgaagtattcacaatcaaaatgcctcagaatttatttacatcattacacccaagctggtcatttgtcttaaaagaaacaagcattttgaactgctcaagaaaggaaaataacatagcataccaaaaaaaaggtgttttaggtttattggtggtggtgtttgaataccagcaacacttggcaggacctgcctaccctgcctcactgagaggacttagaacactggccagcaggtagctgcctgctgttatctaaactcagactggccaagaaccaccctcacaacaccttcttctaaacctgaccacgagcttggctggatattcttggccatcaagattgagccggttttcctgtgtgcctaccatgtgcatgcacccagccaggtggactacgttgcttcctcttgtcctggttttcattccagtctcctccagatgaagagctctattcagaacctccaactactttgcacagttgctgacaacctgcctaaacccagttctccacagttacagatgcctcctaattctctctcaacagttccagctcctgctctgcagtggggttgcccccaagttattaatgccagtgcccttgcattcatttgtgacctttaaagaaccctgactgcatacccacactagtctgaatgacagcgagggtcacctgatcttatggggtactgagaccttggaaaactgccctgtggcaggcaatactgtgtcataggtgagtgtaaaatctctctccgactctccctgaatctattgttcacaacgatagatatcatggtctgcatggcgtaaaggtggcatcccatgtttggcatctgtgttggattagctgcacacaagtttctctgaacttttgatgttactacagtttgctttaaatgggaagtccctttcctttggcagaagtacccaaagcttttgatggttcgttcttagcataagttagcactgaataccaaatcctttagagttctgagttccttggaccagtgagatggctcagtaggtaaagacacctgtcacttagcttggcaatctgagtttgatccctgggacccatatagtggagacagaagaccaactctgctaacgtgttctctgatcttcacaggtatgccatggaatatacacacgtgcacacatgtatacatgcatacacacaaacactgaatgaataaatgaatgaatgtatgaatgaaattttaaatttgaaagaagaaagttaaaaaaaacaaaacaagcttggtattctactaggagtaacagtacacagctatgatcccagcacctggaaggccgaggctgtgaggtcgtgagtttgaggccagtctgggctacatgatgaaacccagcctcaaaagaagtaaatatacatcaacaaacaaacacagaaggggtcagcattcctaactttttaccctttatcatctacgcatttaactctaatgggaatgactacctagagaacacaagcagaagccagctcttagccctgcacaaggaaacccatcctaaaattacctgctggtcacacactcccctccacagtcttagaaacgaaccttcttattcatctatccatacaaaggggtctgatttgggataatgaagaattagcttcaaataaagtcactgtctatggcttagtttgtcctttctgatttgccattatagagcctgccagcctcccagtttccccttcactactgtgacctcatacagcctgggtcccagacttcttcctttgcctcatagaaggggtctgcaagcctataggatgaacaacaatatcaaccaatgagacccacccccagacctcccagggattaaaccaccaaccaaagagtatatatggagggacccatggctctatccacatatgtagcagaggatggcctggttgcacatcaatgagaggagaggcccttggtcctatgaaggctcaatgccccagtgtaggggaatgccaggatggggaagcaggagtaggtaggtgggtggaggaacaccatcatagaagtgggaggtggtgggatagggagtttccggagtgcaaaccacccaggaaaggggataacatttgaaatgtaaataaagaaaatatctaataaaattttcaaaaaggaaaaaaagcccttatgttacatagcaacttgtcatcggaaaatcctcactgttccaactacgtgttcattgtccccttgggacttagaggaaccgaaacactcatttgtccacttgatgctgggagactgacaagagataggaacagcatcagcaacctctgaaggaagatgacaaagttggtcaaatctttcctagaattaagagtttgaaaagtaatagaatagcccatatctttttatttcaataaaaaggttaaaggcttatttatttttactttattgagcacacacaccaccaacgtgtgtttggcctgtgtttgtatgtgcaacacatgtccgcagtggctccagaggactgaacaaggtactggattccctagaaattgagttaccagaggttatgcggttccatgtaggagctgggaaacaaaccctgcaagcacattaagaattcttattactgagctggccctctaggactgctgaaaattgtttttacactatcttcagtaatatccagcatttcccccacttcataacaattcgctgaattctcctactatggcaaagaggtcttcaaaagaaaatggtagtaggggacattgcccagttggtaacattctcactttgaatgccagagcatctgattcccaaatgttcacataaaaacacaaaaccctctgggtgtgttgctgcatacgtgtaatcccagtgctggggaaaaggctctgtagccatgcagtctagccctctctgtaaactccatgccagtgaataagcttcttatacagataaaagggtgaatagcatccatccaaggaatggtacccaaggttatcctttactctccgcttgcatacaacacacacacacacacacacacacacacagagagagagagagagagagagagagagagagagagagagagattgttttccaaaatctctagtactcttccatttcaacttggctcagcagaatggcccctacaaaagaagataacaagaaaatcaagagccattttgccattcatgctatcttagctactgacttgtgacctgaggatacttcatcattcacaagcccatccttggcccatccttcaagggatctgtccttcagacactcaaaatgtatgggaatctgcatgaaagatatggagactccggggggggggggcggtgcacaagtaccagactcaacaaagctgcctgggcagaagaataagagatgcactatatcacatccctctgcaaatatttttgttttcagaaaacgcaataggaatctctaaagagtcagtaaacacgtcctctactctggtaacctatattcttgtctccatgttacaaatctacagatctaactgctaaatggatggaataagggagaggatgaggagagagggggaagaagaaaaggaaagagagaaagggaggaaggaatagaaaggaaggaacaaaggaagaagatagggagggaggaaggaacagagggaggaaggaaggaaggaaggaatacaaaggaatgaaggaacaaaggaagaagggaaggagcaagggagagaggaagaaagggagggaaggagggaggaagaaagaaaggaaggaaagaagaaaggaagggggaatggaaagaaagagtgaaagagaaaagagaaaagaagatagcaattgttatttcaaacagagaaaagtagcatttgtttgttgtccactcctttcaaacctcccttgagtagccaattggcattataattagatactgactgcagttcactaattgctaatctgcaccctcacagttgggtctctgaccacagatgaatcagcagacaagcttgcggctcacatgatattgtccctgtagacttgccactccagcaactcacctggagtcatcaggcttataccaactggccaaggacactggtctgtgctgattaaccaaatggaagcctcctatggctcagcaatggcatttccatatagctttggtatgcttcagcctgtgagctgagacagtcagatcacaagaacaaatatgcagaatggcctaagaagttggtgcccagcactgagtaagaccactgctaagcagatgagaaagatgtatgaggtgtaattagattgttttctaagtctttttttaaaaagtcgttatttcctccagttgcataggccagtgagctcagcagaaatacatcctgtgtctacctcagtgccatcatgctgcagattaagttctttggttctcgtagtctcttttgtgaaggaacaaaacagcccttaaaaaaaatcatcaatcagatcggtgttcagatgggtcatggcttgtgcattacccatgcacaaagattacgattaaatacactccacatcgttcttcctagacacaagcaatcatcttttcttttttcatctcttaaggctctattgctgttctttgagttttaaatatagggttctttgtagcccacgctggtcttgaatcccctaggtagctaaggctagccttgaactctggttacccctacttcctcttcctgggtgctaggattgcaagaacgtgacctaatgcacagataatttcttacagttcttatgacgatatttattgagctgcttacaggatgttctatgctgtctaagcattatgcaaattaattctcatatccttgtgcaatgagctctgctatgtcctgtttcttaccgattgagacgaacgagttttgaaaagttaaatgacttgttacagttgctgtcaggagagaatctaggcaggtccagctcaggttgtttgtacatgtaaccacggcagcacacatgtgctagagcttcctggggtcacctcagaagctcctgtctgagtcatctatgtcttacttcagttgagaatggcccatcgaatactaaaagtctaacctatatgacactatgtagtgagttttacaacctccctaagcttcactcccatgcgttctctctctctctctctctctctctctctctctctctgtctctctctctctctctccttctccccgccccccccttccccgccagctagaaatggccttggtagtattcttttgttgcacagtcatggaacaagttctttaaaacgttaccactgaccagtcaatcacacatttattaaatgctatagggtgtagaagtgaagttcgtcctcagtgagctgaagggaagataatgatagctgacacaaagtaagtgtatctaattcaaaccatacatgttagttttgaaatgtcctaagatacatgagaagagaaacaactatgtgtggctagctatactgtgtacatgtggtgtgtgtctgtgtgtgtgtgtgtgtgtgtgtgtgtgtgtgcgtgatgcatgtgtgtgtagatgttcctgtgagtttgcatgtgtgctgtgtatggaggccacaggttgatttatggtgcctttctcagtcactttccaccttattttttgagacatggtctcttactgagcctcacactctccagtcaggctagactgaccactgagcttcagagaactgcttctcttctccccacccaccagccaaccagaactaaagttacagatgtatgtaggctttttacatgtgtgctccagatccaaacacagtttctcatgattccatggcaacgagtttgccactgccccaggacagccatcattttaagtcttctctctatataccttaaaaaaattggtcatctttcccaccagtcagtacactgagcaagcaatacccatgtgtgtgcactgacacccaagtgccagactgtgatcaggggcacggataaccctgggccttgaacttagcctttcagcagtccttgatagacagtgaaactcaggtgtctgctatctcacaagcaaggtggaagatgacggacataccacattgcaacacatccaaatcgtatctacagcctaaatgaattacacacaactcttctcccttgatcttcccagactttcattttcatctcagaagattagattagtatgacaggacttgtccattatgaagtcaggctcccagataaaaggcttcttcccttcaaatgattgcaaattggttttgttaggatttcatttcagtattccttgagagaagctactatgggtgaccatttctagtttcattttgtccttctaggggagcaatcatgtctagccttttctccttccatatattggattcctttctgctgcccctttccctctggacttacattaccttttaattagacacactggctagaagatcaatcactaatttaaatgctgcatagaagtgacttaagttgcaaatttatatctaagcaacttgtgaaagcagcctgatgccaaattctcctcccattcaatgtcttactccctgcactccaaccacttatcaatatatagatggatacataaaaaccaccagttctcaaagctgcctgcctgattatcaaagaaatataatggctatgtttcttgacttcttactcattgagcaaagatcaattttaaaagagctgcttttatacttggccaaaagaaattaaatgatcatgtggtgacaccaggtgtgctggtacctgcctggatccctggtacgctggtgtgattctaaggaggatgctcatgagttaaaggtcaatttggattatatagtgaatattgggttagccaaggctacacagcaagactgtctccaaaaacaatgctaaacttgctacacttatcataataattaacaatgatagtaaatatagtagttatctagtatgatcttctacccttttcatactaacatcacaatctgagctagagaagcttccgagaacaagagacagggcatgatattcttttctacctgttgacatacataacaatttctcaacacagttactaaaagttacttgcaaattatgcttcacagaaaagaggaaagatgtctttggctctttaggaaatggtttgtttgattcatatttctgcattcttcaatgataacaagattatcagaaatatctagataagaaaccctaaaatagttcccacaaaagaaatgtgatctctgtgtgatgatgtagccactatggaaatactatgaagcttccccccaagttaaaaatcagaatcaccctatgacccagctgtaccacttctgggtactttccagaagtagtctaagttcactgatgaccaatagatccatttatatgcctgttgactattgcaccatccacaataggtagggaatggaaccacatacacattcattaacagatataaacaaagaaaggcatggcacatatacaatagaattttattcgggtactcaaaaataattacgacacgtgctcagattaaccagtgaaataaaccagtctcagaaagacaaacactatgtggtggtgtgatgtctaggtttgtttgtatatgtgtgcatttatgtgtatttgtgtatatatgtgtgtgtatgtgtatttgtgtgtttgtgtgtgtgtgtgagggggggcggtatggatgcaggcaagtgtgtgtttaccacagtccatgtttggaggtcagaagacaacttccatctttgtttcttcacggctgcataagcaagtctaacaggctgttggaagtctaacaacacttttgtctctgcttcccgtaaccctgaaggagcacgctgagatcacagactcctgtactgctcccccacccccaattttccatgggttctggggatctgaactcaggttgtcaggctcacaggccacaaaagtagaaagggaacctatgaaaggggaggaacagatcttaagggtgggaaggaaagaagagagcagtagaattcttatgaaatgaaagaggggggtgaagtatttggggactgtggagaaaggggattaacaagagagggggtgggaggaagaggggagatcagtgggggaggcagagggacaaacccaaaatgtaacaattacattgtacgccaacctaaaatattgattgcaaataagagtcaaaccccgtcaagggattgcactgtatcaataatctggtcgcactgagttctcaatggtcttctgtaacaaaaaacaagttcatttagtcttaattctgccaactccttaattctaccctactgtagaacaacttccagattcttctatttgttcccccatatgaaagtttgccctgactatccagagactaccccacctggggatccatcccatattcagccaccaaacccagacactattgcatatgtcaaaaagattttgctgaagggaccctgttatagctgtctcatgtgaggctatgccagtgcctggaaaatacagaagtggatgctcacagtcatctataagatggaacacagggcccccaatggaggagctagctgaggcaatcctataggtggaacaacaatatgaactaaccagtaaccccagagctagtgtctctagctgcatatgtagcagaagatggcctagtcggccatcgctgggatgagaggccccttggttttgcaaactttatatgccccaatacaggggaatgccagggccaagacgtggcagtcggtgggtaggggagcaggacagagggagggtatagggaactttcgggataacatttgaaatgtatgtaaaggaaatatctaataaaaaaaagtttgccctcctctgatcacagtaagactcttcagacaccacgttgcctttttattaaacgtgttccaggggaggatttgaactttgctcagtgaatggcttctaccttaagcaacgaatcccctccatcttaatcaatcttcctttgccatgaccttgggctctcagtgtcagcttctcttttttgaaagacacagtcatcattacttagaggtagatgctgggctgtactgaagctgcccattgtggtgggagccatcgaatcccatgtctcctggattaaatctttaaatgatgaaaagacagtaggtctttcatgtaagacataaaaggagcaaaggcatggaaaaccaaggtcatggcacaagaagctgaggctagggattgcagagaggagctgggctaggtgactcggaccacaaaagaactggagggactttaatatacagacctatggctgggaagatgactctgttgggtcaaagcacttctatgtgagcctgacaacctgcacatagatccccagagcccatgtagacgtgggggcagtggtatatgagactgtaatctcagtgtgcctctatgtgggggtgggggtgggaggtgggaggtgggaagcagagacagaagtattgttagacagccatgtctacgtgcctacacttacacaggaagagaccatgtccctaacaaagctggaagttgtcttctgacctccaaacatggactgtggtacacacacttgcctgcacccatatatcacacacacacacacaaacacatacacacacacacaaaacatacatacacataaatacacacacacacacatatatatatacacacacagacacacacacaaatacacacacatgcacacactcgcctgcacccatacaacatacacatatacatacacaaactcacacatatacacagaaatacacatacacacatacatacacaaatacacatacacacatatacacaaaaatatatacacaaatacacacatacacacatatacacaaaagtacatacacatacatacatacttacctgcacccatacatcatatacatacacaaatacacacatatacacacaagtacatacacagatacacctacactcatttgcacccatacatcatatacacacacaaatacacatatatacacacaaatacatacacatacacataaacacacacatacacaaatacacacacactagcctgcaaccatacacatcacacacacattcacctgcacacacacacacacacacacacacaccagcccttgtgtctctgagagagtcccagtaggcagcccatcctgaagtgagctcccaccttctccaaaggcagcctgactctaagttgccagctactgtgttttgtttccattctggctttgccctcatcccattgacaactattctcgctaagttcaagagccttacaacataagcccactgaggtagccagtgttttgattttttaacattgtatatgctttctgtttttggaggcaagcatctacctaggtgacttccaccttgcttggaattcaacaggacggagccactacggtcaggcttggccccggggctgaagttagtggagcagaaatggtggcttgacagagttccctcagcaacacaggtcattctcagaagagcctcccacctccaaccaaagccctttccttggtctccattgtgcccccatccactggctgactggcactcattcaagtgtggccttttgtcacagaggcctaaagataaatggcttcttcactgtgttcataccacagtagcatgcacacgcctggcagtgcaggggcccacactggcagcatctctccattttctcttgtacctatgcacccgctgatgtctattcagtatgtaacacgtggctgacacagggtagggcatggcaaggacaatgtagtttgtgacagagtaaaatttgttttaaaaaggcgcaaaccaaaataatctagtttctgaaatactgaagaatttgttgggccgggggaggtggcagccatgtgttagcgctgacttgaggttggaaggtcagattgtaagttaccccttgtatggatctatctcaacacaagctgcaatgtcctcctctttagctacccagagaagacaaatgctgtttatttagaaatgcaatggcttaagttactctgtgggggtttctattaaaatcaagaagctgaccctccccctatccctcccctaaggagacctctgcaaacatttgcctcctgtgttccgcccacaggacaggcatctcagcattttcaatgaattttgatacctggcatcctctggctcatacttcataattgattccagaaaaaaatacctaaaatctatgtttcagtactatgtttcagtaagccaatgtggatgtaaaaaagattttactgagtggctgaggcagtaaagcagtaagtgcaaaattttcttttaaagcagcaatgactgatatatatatatatataactagatcaaaatggggaagttgaatcttagcctcctattcgcctggaagatgagagtgcccgttattagttaatagatcagtaaataggttgacatgaaaccagaatgttttgtatagtctctggtgcctgctcaagttttctggttcagtgaaatattaatctattaaagactacggatgccagagagccttatctctggcaggtttataaattggttaatttgcaaaattcttcattgtctctattatcctctcatctaggcagcagtcgtgtctgttcagacacagcttctaagtttgactgatcctgcagggtactgccggggaccattgactcctgcgtggacagactttgagtcatctcccaccttacattgggtctacccatgacgtcaggctgttcctcggtaggatgactgctacagtgtctagcctaagaaatagactttgcctctctcttgtttcttactgtccagagagatatctaaagatgaagcagtgactcagtgaggaactctgttctgctgtcttacaaaggccatcttcttccactactgtttgcagctgccacctggactcaggtcgggcagctcccatcaagtaggttcaccaggtgccattttggcaaccatcgggcttccctgctgtgccaagtgtaacagctctttactaccatgtgagaaacagcccttgtcttcacacagggaaacaaggtttcctctatttgtcccattgtgagtcctcccagttggaggaaggctatcgtttctgtctccttgctcagcacatacaacgtgagcatctcctttcttcttctcatttgtgaccctcttaggccacaagctcctcttgcttctctctgatgactcattggatgcgatatgaccactgaggcagctttctaatatcatcagctcatcagaatctgacagtgtgaagttctgtaggtatggatgcaaaagaatgcaaaaacagtctccactaaccaagaagtgctgcttacatcgtgactgtatggagtaaatacttggcttgagagctggaagagaggaaggcagaaatgaaaaccaagtttccaaatatctgatatattagtcacacagttttatcacgggcgacctgccatttttaaaatgaattaatttattttatattatcctttgttgtttgaaaactccatgtatgtatataaatgtttatttaatcaaatcgatcccaaatctcttcccttccaattcctccttcatttcccccatcacttccgccctcaccccagcttcatatgctctctctctctctctctctctctctctctctctctctctttccctccctttttccaaatccactgcattcgtttagtgctgcctatatgtgcatgggtctgggagcacccgctggagcatgggtagcctctccgggcctcagccttgaaggactgcctctctcccttacacccactcccacacagcagccatcaacagccaatagctcctcagtagtaggaggagctcgtgagccccactgctttccgtgtagggattttagttggcatgatctatcttatgaaagtcttaagcatgcagccccagctgttgtgagttcctgtgtgcaatggccctgccatgaatggcaaatgctgttggctttactgcagaggtcctctacctctggcttttatagtctttctgctcccacttattgatctctgagcctatgaggggacatggtgtgatacagatgtccctttgctcaaacagacattgacaatctataacggattgttttctcttacaaatcaatgaatttccaaacttgttcataggagtccataggtaatcatcctttccaatgctacacattattatctaatcacttcttccttgatagtaaattgtaaattctttcttgattattttgtatccttatatatgtgcttgtaaaattgtatactacaggattccaattgggtggatgttttaatgtacatacaccttgactgataagttctcaaggagaattaagagaagtaggtagggtcagtggccaagcagagggaagtcacaacttcttatatccataacttcaaaaataagacaagactgcaaggttcagtctctaagagggaccagggagctcactggttctggccatgggagaagctcaccctcaagcattaggatactaggaactgcccaggggggtagtcaggatggttaaaactatagcagtactagtgtacccatgttgttacccagtgatcacagtcaagttccttgcaagccacatgggaacagagcaactccatcaaagaatgactattttttctctaaggacctacatatttcttgttgttcttttccaagataaatgtttacattattgggaatggtctgggtattgttgtgggcatgtgcatgccatccttgcaatgtgttgtgttgtgtgcatttgtgacatacagttggggagacaggaacacctaacatataggcgttccatacacacgacttaatgttgtcaggcaagagaacttgttggcccttccttattatggtatacataggcaatggacctagaaggaacccacatcttcctagagatgctctaagacaaacgcctctccctggaggagacataaagcacacttggccatcatcatgcaaggattcttcctgctctggctgacattgacatcaggagcaaaggtggggaaaagtcataagactagaatataccattgggatagacagattcatacaccaaatcctatccattacattgagaagtgggagcatatcttagtagtaggacattttcaggcattcatgaagcctggctttgattcttcacactaggaaaagaaacacagaagaaaaccaaaggaactattccagataagaacaaccttcagataggaactgctaatcagaaagaaccacagtggctggctctgtctcagacatagggctatgcaatgaacaagctcagcataaggtttaacaggtgcacagaagaggacagttacagtactgcacgagtcaccgtctggacgtcctttcagatatggtcaccctggaataatggctttaacttggaaacactgaacaaattaattgattaagttaatttgactactttaattaaattcttccattatttaattaaatgaagcaatgcaaacgaacgagatctcagaaaaataaatcaaggagaaaatgtaagttctgatactatgacaaaattcccgaggctagcttgatattttagaaggatgctatttagctcccaggtttggaagtattacatccaaaagcatggtgacagctctggtgaggacttcatggtacaagtgaaaacaatagaggaaggtttgtcagatgggaaaccacatgggaaggcaccatccatggtcttccgcaacagccccataaaagaatcaacttcccaaccaatcacatcacttcctcttgggatcacaccccatcagcatatgagtccatcgcttgcagtttccaccatgtcccaacagtgtcgtactgggaggcaatctcccaccacaggactctctgctggaataacagctcctctgccccgttccctctgcttgtgctgttctgctccctcctcccctagggtctagagtcaggctgacctaagggaactcctgacgttctgcagcaatctggtgagataatggagaaacgtcagggttgaattgtgtttcctgctaccatgggcagaagtgaggtttagtaataaattggaaaataaacatgtgactacgttttctccccaagccaatgactggtccaagtgaggacaaaaatcagtcacacagaaaatgaagttggaaccactctggctccaatttacatcaatttgctagtagattttgtgtttatctcaaatggtgaaaagatagaaaagtgatacagtaagagataaattcctaggtgatttatgtggttgttcagcccagtgctcagaaatgggtgggtggggggatagggggcagctcaaggtgagagcatttgactggcatgtgtgtgtgtgtgtgtgtgtgtgtgtgtgtgtgagagagagagagagagagagagagagagagggagagagagagagagagagaggagagagagagaaagacagacagacagaaacagagacagacagaaacaaagacagagagacagagacatgcagagagacagagagagacagagacacagagacacacagagagacacagtcagggacaggcagagacaggtagagacaggtagagacaaatagcaactttgtcagaggaagttcattctaggaatgaaaattcagagacaaaggaatgagaatgctaaaatggttaagcacagaaaaggcatttactatgatttacagatttcataataattgcaatgcaggatttagcaggaagggctcaataccactgttttcctaattttgcaaaatcagatgaacaaacaaagaacaaacaccgttttttgattgtccatatctgttttgttttttctattgttttggttttcattgacttatttatttattcactttacatcccagtcatagtccacccctcctcctggttcctgcctcgtgcagccttcatccccatccccactctacacaaatattaattttaaaacatggtatcatactagaagcagtgctttgctaaggctgctctctgtgggggctgcagtgagggcatgtagcacacagagccctgtgaatttgcatgctttcaatcacttctgagcacatactttatccaaggcctgtgtgaggcacaatgagggtacaacattcaacaacacaacagattttttttttttgagactgggtcttactgtgtagcctcaggctgctgatgtgaccttcttgctcctacttcccaactctgggattacagacatgtctctccatgcctgttggaaatgaccttggatcagagttcaaagctctgacagctgtaatatacaagggacagcagtgcaaagtagaaggcaattgtcaccagatgttgtagggcttccgaagggaaggacacacatgagcagggatcatgacaactgtcactttttgaggagtggaaggtagtcatgattcaggtggagtggcagagatgattacaagatactcccagggattcgatcagaaattagaggctgattgatggctccttgggtaaagaaaggtatctgtcaccaagcccgagttcagtgtcatccccctctcccccaaaaagctgactcacagaggggaaggagagaactgaaccccaaaaactgtcctgtaaactgttctcagacctccatacatgacaccactgtgtctatatagagacacatataaatttaataagtatatgtagtcaggacattccctgggcaaatatttttcagaatttccaataaactctctgctacaacttcacagaaaagagaaaggacacagtcaggaaaggggtgacatagactcccctgtacagtgagcctaatgaggaaagagagagtcttatcaccatggtgggcaggcagggccagacttggaagtaggagagcattaggagctagaaggagcatcatacctaggcagcatgaccaggccttgaagagaggtttcccttcaaatatggagaaaaagaagggtctaattcacaggttttcgtgatggggcacaaattttgtaccacataattttttgtgtcagtgcctatcctacatatcaagggacacagaggcaggtatcatgtaggaccataaactgatcttgcagatgcaaagcaaaggggctgcaacaccacagcatagaatgattctgtcccagagaaagctatggtggggcgtggtctgatttctaggcaggagacaagaaggcaactaaaagattggtctaacactctcaacactagactagaggctaaaagtcaaggctggggctttccacttcagcttgcatagtacaataataaaatagtacttagttattaagtggcctttccattagtcagtacaatagaacactgactaatggaaaggccacttaataactaagtactatttgccatcggccttgtagaatggagcccaggagcagtcagtgctctttgatgagtctgtccggtctggaaccagaccctaccatctgaagctgcttgctaccataaagcaattacatagcctgtcttgctatggcttcttaacctataactgggttaggaaagtgcccaccaacagggtaagcaaaatatagcctgtgtggtgctggctatagagtgaaccatgcattagggctcagcaggtaattccacaaggcatgtatttgtttccatatctttgtctctttggtgcaccataaagacagctttttaaagattgcctagggaagactcaggcaaatatactaagttttcaaaaggcagtaatgggtttttacatattactgtatcagccagtatacacagtagacaataagcacattactgcataatacagtaatgttatgttgtttcatacttactcaagcagtatatataaaagtactctgaccctatagctaatgtgctctgtacacatgcctgtgaccctgggacttgggaagcaaaggcaggaggagcaaaagtttaatgtcatccttgggtacatagtgagtctgaggctagcctggtctgcatgagtttaatgtcatccttgggtacatagtgagtctgaggctagcctggtctgcatgagtttaatgtcatccttgggtacatagtgagtctgaggctagcctggtctgcatgacgtcctgtctcaaaaggagacatatattatacgcatgtgctctttaattactttattagtttggatggctaaaccatgagctactgttttactttcaatctatttgtttaaagtgaggttgaacgtttttgtgtcattggtgacaattacatttgttcacagaacagtatgtctgttttgcagtagcaactctgtggtagagactggttttaacaagcaaagaaatgtgacattctctaaaatagctgagaagatacttaagttagtactacctcatactcctccatacaagtgctgggtcatctcatgtgtattctgagggaagggaaggcataagctagaaaataaaggtgaaaatctgtgaaggttttgagcaggaatcactaggaatgagggcagacgaaaaccgagaagactatagtctgctccgagagaacaaaatgaagctgcagggaagagagactgagctttaaaatgatcgtcaatgccaagcgaagaaagagaggacacattaaaaaaaaaggagtcccccaaccgttaaaatcaacgtattcaattaatcataaatgattacccttatgtccttaagtgtggtcctgaccacagtgccatgctgtggaatgagagatgttgtgggcaacggagggataataatagtccagggggaacaagagcatgctaacgggagtcccagaggtgcatggcaccaatgccaagatgatctggagccctcttccattaacctggtggccctgtctctgtcctgatcccaagcaagaagagcttctgagtatggatgcgttgggccaaggcacctttggaatgccccctttcagttctgaaaatggaaggacagctcagagaaagcagagtcagcagtgggagccagcacagcagtgactcacagccttcttcctgtaggcttcctggagaactcttctttcagacgactggtcacatggcaagctctggtccacatctggaccgctcaaacgtaactgataccctccgttgactctccttatccatgtcaatgtcagcccacctcagttgtactagggatccacagtgaagccaagtcaagatgggtaaaggaaagaaggcaggaggaagatttaaagagagttgctgcttgggccagagaaccttctccatgtggtgaccagcagttaaacagagactcacgactggtcaagtgctgtgtgtgagtgtgagccttcagccttgaagggcacttgtacatcaactccctcctgaaagcttaggtcaccctgtcaaaaagagagcagagagaatgtaggagccagagggtttgtgtttggagcagcgctatgaattgatgtcttctggatacacatgtctgctgcagtcatgaactcacagcagctacggttacctactcaagacccatccaagatcagctaacgttcttgtggacttcactaattggacttaaggagtgagggagaagaagacatagaaatacaagggaggggtgtctcagagaaagcaagagagttgggatgggtaagatcaagatcattgtagacatgtatgaagctgccaaaaattaaaatatattataaaaacagttataaaaaggaaaatgtaaagatcatgtctcctagtgtactggtggacacagaaccccattgtacaacgggagctcgggaggagataggcctcagaagtagctgtaaaatcaggaatggctgggcagaaaggctcaaagccagaaacgatgtcagcacagaggttcatgcctgaaacctcagccatcaggaggccgaggtaagaggactgtggaccactcaaggccctacacaggcagtgccagccagccggaggctttcttccttgtcccccttccctgaagaacgcagatgtcccaaatgtacatcaggtattttgggtgctctgtgcttctttgaagcccacgtgtaggtggtgcccctgttctatggaagctttgttgactcaaatccaaacagcaactttaagggcgtcacaaccaaactgtctccctggattacctttgccacaattcccgtgtcttccttctggttatctctatgagctctcaagcctgattgctactgttcagcccacaccaattaaaatctaaggtcaagctttttgacttgttctagcacagaggaactcccggccataccatccactctgtgagtgtaggaacttcacagacttgaacacatcagggaggcccagtgttgcagatcgagtgaccttccccagcactgtggacacactactctttcctgtcacattcttcctccagggtcctcctatttttgaacattagagatgtgaacagaagtttctggaaagaaactgcagtttccgctgacctttctgcaaatctgaatgttggattagaattctagtgattgagagaggttgggatgatgcaagtccagagccaaattatcttgggagcatttttagcctccataatagccattgattgccctccttctctaccttacctaattatttaaattatttggaatatacaaacacagacttagttttcaaccaaacaaaaagcttaaaatgtcatcagataacatctgaggcctatagctgtaactttcctgctttacctaacccacctgcctaaaaaaaaaaaaaaaaatctccacctgtgtttgatttatgacttttcttgctctgttactataaaaacatcgtgaaactgcttccacattggaacacgtaatttagggtaacctaaatctgtatccctgggccgtggtcactcatatgtggcttccggataaattgtcccttacccccttcaaactgagagttgtgtcttcgcatcagcagatacatttatttttatcttgttcatgtatttcttcttcatttcagacagaacatttacctctttgaagtcctctgagttctcagtttctactccaagtagattttttttgtattatttttatcctgttcccattttcctgtctgtctgtctgtctgtctgtctctgtgtgtgcaggcttgcttttgtatgtgtgtgagcacatgtacatgtgaagtcacatacagatgcatatctgaatgtagagacccaagattgacatcagacatcatcttcaacacctttccacctgttcactgaggcaggccttctcagtcaaacccacttcccagcagtcttgctagctatcttgttctgggaatcccagtctctacgttccatgactagaatgacaggttggttgccatgactacccagtattggtgtgggtgctgggtcctcatgcttctgtggcaagcactttagcctctgaaccatcttcccagcctctgaattaactcttttaaagatcatattactctctctgcacaggagtccacaggatatacctttcttcagtcagatctcaggatgatataaattgcataacactagagaagttgtatgccaagagtgtccccataagcataggtaatattcaaaacatagctggcacaatgcctttaatagtcagccttattcagaagtggagcatgctcctgctaggtcctgacttatgagaaaattagaaggactaattgtccattactaactggtatagaagtacagatgtccctctttgtccttgggggatcaggctcaacaacctcctcagtggataccaaactccgagactgctccctccagtccctgatataaaatgacagcacaggattagcatatgacatatggcatcctccagcaagtagactttaagtcatctctatgcataactcctagtataatgtaaatgctaatgctaatagctgggtaaggactaatggtagtgaaaaaactgtccagactcaaatgtttcataaatacttcgggtccatattcgcttgactctgttgatgtagaacttggggatacagagtctggttgtgcttcatgaactgacgtcagcatgagcatataggtgcttagcagctgaactccagatcatcctggattagtaggatgcctaatccgagtcagcggcttctctgacatctcacaggatcctattttatttgactggaagtattgcttcccgtcttcccagtccttctcttatagaatcacctagaagtcatcgtttgaaggaaccctgcccctaatttgatcatgtactgatggatttataatttggccgaggatcagtgttctgaggtgtctgagaaattccctcacttttgaccaaatattttcctttaagttcatggggaaattaactccattctaaatcactcaaatgattctgacctttccagtttccagtttccactttcccaaggtccttccaatagcctcttttccaataggtccaattcaactcaccttaccataggtctgtctttgttcatttgaagttttatagattttactaaaactcaacatttccctttgctttaagtttttgttaaacagcagtcttgatgttcatgaagaaaaatataatatggaccgtttttgtaataaagttgtctcataggtacattgcaaacaaacaaaaatgaatacgctaaggctctgtagatgaatgctaactaaatgtataaaaacgttccaatgcaaaatcactgtataaattaataatgagctaactcatgtttcttgaattaaattattggtgtgtactttgcacatataatgcatctcaatttggagtagacatactttaagggtgcacatgtgcccaattgcagacgctggagctggggccatactgcccgcccagctaccgacagctcagccagttgttagcttggtcttaaataggaactactctgcctgtgtccccatctttcaaaaggcaatggtgatgcaatgcacatcagacgattacccgacaaatcacccgtgaggctgggattctgaagcagagaaagactggattaaatggcactgttagcactatcattgctatggcctttatttgcccaatactacttactgttcaccttttcagctctttgttcaaaatatccaaaagaactggtgtcaccacagcaaagcaactttcctgttagaaaattatttttcagctacttctttctcttatctggaaaacccataccctagaatgatgctctctctctctctatatatatatatatatatatatatatgtgtgtgtgtgtgtgtgtgtgtgtgtgtgtgtgtgtgtgtgtggtgtgtgtggtgtgtgtgtatgtgtgtgttgtatatatatatacatatatatatatatatgtatatatatatatagtagttataggatgctgttccagaggctgcagactgaaggtcacacagaggtgaattaactgagtatagcagcccaggcacaaagatactcagaagtgcaaactttatttagctggatccttatttattgtagagccatcttttaaaccagtcttctcatttatgcgagcaatttcatctctatgcctgaatcctagacaatatttcatgatgactctgtaggaaaaaagcactcagtgtgatttaccctcccagatattgtaggatattatttatgtggcctgaagcaggtgccgcatccatccccagctgtggcttcctttcaaccacgagaaacagcaggtgttctggttcccaaaatgtctttcaaaaacaattctgacggtgccaggagcactgggaacactggtgactggagagctgctcgtgtgcacagggatgaccatagactgcagagtggggagaaactgaattagaatccagctctaggaagggtcaagttcaagagagcatagggagaagtgagttcaagttcaagagagcatagggagaagtgagttcaagttcaagagagcatagggagaagtgagtcaaacgttgacagtcaaaaatcctttaggagcaaagatatttgcagaactagattatatgatatgtgtatgggaagtgacttcattctatgtctcataaaatggtttgagagaacttgagggggggaacatgagaagtttgcataggcaagaatcatggtttatgatcgttcaagaaaagaaaagaaaatccacgagagaggcttgtgcagtgtgtcaacctatagtctatatggacttttgccttgaagggagatttttatcatcacgtatatagccaagtagctcaacaagacattcaataagacccatgtgaaattctgacaaaattgtagaaataatggagagaaagatggctactaagtcctgttccattcaaagtttgatcagtgatctggagaacattggattaatctacaaaatgcatacatgccaagaagatgagaagaacagaggtgtccaatgaaagaccgaaacttgaaaattactcaagtaggctagggaaattagaatcgtctgatcaaatgaccatgaacagggttatctctgaaaccacctatatcaatagatcatgagacatttaagaaaccagtctgtcaaaacagctaatgtccccagcatctttaataggcataccctcctataaatgaggaacatgacagttcatcacattagcctgtaagcaggacacactgataagctgatcaacggtgtcttgatcaagtgcctaccctggaacagctagaatttacattgagaataatccacagaaatttaggtgacttaggttataaaagagaaaacctggggctgccctgtgggatctaatgtactctgtggtggtcacatgaaaagcggtcttaaaataactccagaaagcaaaatgtgactccccccaaatgtcaatgacagcacagcagatttctcaaaataaagaaaaatgttctcgttctgaatagaacaaattcccttgattacccaagtgactttcctgctctgaggaacattctaaggaaaagctactggatacctgtcagggattcctgaacagaatgagatcttgaactaagtgttctttactgctccttgtaagattctgtaaatgtgctgtctatgtagaaaagcatgaacaataccagagggctcttttctcaaagtctatatagtttatacaggtttatctcgcccactacactcaaccttctcactaaaggtcatgactgcttccactagatgaaactcaagaataatagatggaaatgatcttttcttcttgtctgtgaaggcgaggaatggatccacctagcattgttgttaatagtcccatgccaagtggcatctggtgctaatagtctgagttcagactactctgttaaagatttgttaatttatgttatatatgaagtgtttgcctgaatgcatgtatgtgcaccacatgcatgcctggtacctgagaaggccagaagagggtgccatatcctttggaatattcacttacaggcacttgtgagcttccatgtgggagggagctgagcccttgcaaaaacagctcatgctgttaactgccgagccacttcttccaccccaattcaggatacatttacttccaagaggaacattttcttatatagcaaatgaaagaagtcttaaagtctattatttgtacgttcgctatcaaatttcaataatacaaagattgagcaattttattacatacaaccaaaaataaaatcattttactcgacggttttgctgaaaactcactcaagtattctccacatgggtttatttctctcacataccccaaacatcatggggaaagattgaaaagacaatagtattcatcaccatggagagatagagaggagaggggaggagaggaggaggaggaagaaggggaagaggaggaggaggaggaagaggatgaagagagatagagacagaaacagagagacagagacagacagacagacagacagagacagagagacacatagagagaaatacagaatgagacttagtgttctgtgcataaccaggatcccctctgtattgcattatgacatctaccaatctccaaaatataggacaagagcgttgctaagaggaacagaccttcagagaaccacagagaggaggtgaggtgaaatgcaagccaccctttgttccaagcaacaggcagagttaggtaggtgtgaacagagaaatatttcaaaagctaatagccacagcaacaaggtcgccttgacctaggcacagcgatctgggttacacagacaaagggaaccgactgaggtctttgaaaacctagagaagttgattaaggtatccaggctcctctgtggagttaaaatatgttttcatcatgatgaaacagacatcatttccattaagcaagctctttccaaacagttaaactctagaacctgcttactggccagtcttggtatatactagtgctgaataagcctcttagacgatcagaagaaggtagaaatgagaagatacccaagacatagaaggtatcccttggtgttctagcgagttatttaagtgtctccacagcagaagcctttcaaaggccagagaaacttggaatggtgactaaaatatacaaagctttcagcaaacatttgctgtgtggatacacaagctcagcttgatctgtgaccacgtgacagactgaatatccctggctcccatccgtgatctattgtagccatgcctctgtgagtgtgagcgagcagtttttcccactaagaagtaggtttatttcctctgcctttctaatgagttagcatcgggagtgatttctgccaaggtgatgtggatgaactattgctgtactcgctctaaggttgggccaagaagcaccggaacaggcgagaactcagctgtgattggcagagaagacttcccagcacacagcggaccacagaccacagaggggaaaccagaggaaccacctacttgatgactaacctcctgggagcaagatgtggtcactgcactcaatccttgcgtcttgcatcatcgtattacaaacaacagtgaggaacgcgactgctaagagcacatctagcgatcttattgttgaccttgcccactcacatttgtgatctattttagtggttcctaatttagtttaagagaaaaggtaaagaggctctcattctgtagaatcctgaatcctcacaagcttctacctgccagtgcttattaacgtcttcatttggttcccagcctttcatttaaattagcctcaagctacttccctggcgtccacctcagctctaaccctacccaaagccaaattgaaagaactcggggcataattacaacgaacatgtcaggagaagtccatccttttaagccgtttggtacacaacctagtcaactttcctatattcccgattgtgctcagttctattgcaaacatacagttccacgttagggttctaactatagaccccatgaggtttcgcatccctcacctccgaaaaaacgtttaactctttcgcaccatgtacggagtaggaaggaatagtgagctattcgtgcggccaagcattgctcacagttttacccaatatgtgctttcattctggtctgagaccttggctctcacggcaattacatcacagactttctaggctccatcgccatttgccctcctcccctcctttatgtcttggttcaacttgtcttgttagcttgaaacctccttttaaacaaaaccccactggaagccacctgctacccctgaggtgctaccccaatcttgactctctttctgtaatgaaaggggcatagcaacaacagccataatatctatcaagcacatgcagattcaacctgtgttgttaatcacaaaaccctttgacatagtcaccgtcgttattttctatatatattgcaaaggaagaagctgcctatatacgcacactatgtcatcatatgtcatatgtctatgttaataaagtcaattaagctgaattaagtgacttgcccaaggtgacgcagtcaccagcaggactcgatcattaatcaaaatatttttcatcccccagtctcacactaattttctgctccctaggaaaacataatagctccctggcttctccagcagagtctgagaggtttggcctttgcccatttttttttttccagtaagaattcctaaactgaacacagcaggtaaatttttattttctcctccgtgtcacactcattgtttctcagtcagagttccaaggcaagagggagaaagtaagtctaaagctaaactgaaataacaatttggaggtaattagaattaaaaatttagagaaaaaaatccatcctcttaacccattcatccgtggctgagccaatattttcataatcccaactgtgctccgttctattttgaacatgcctctgcatggagatgtgtgttatcacattcatccaaacgtgcgcgcacacacacacatgcacacacacacacacgcacacacacacacacacacacacacacacacacacacacttcactaatgccttcaacatgctaatctccttctctctttcacacattgatctctcaaagaacatcacacaaaggtgctttctgatctttgctgccctttaaaactcacatttattcatctgtttagagcaagcaagaagcatggaaatcagagaatctgctctctctttctaccgtggtcccagggatggaactccggtccttgggtgtcagacttggcattaagcatctttaccctctgagcaactgggcctatactgcttttaatgacataacatggcacccacaacaatcctagtccacgtgagcctgaggggacaagtgtccaaagaccagaggccaatacaggcttggagaaccaggaagggaggaatgaatgaatggatcgcaagtgtccaagctaaagaggaaggcaaaatgcgaagagctggatataaacccgggtgagccgtgtaagtttggaagttactcttttactaactcagtggggaataaaggaagatgcatgcgttgtttaatgctcagcttgccctctgcctttctctgtgggtgacactatgcagcaggcggggtcgactatggagagcagcaggggctaggaagggagccagaaagggtctattcacgattgcttagtcctcccagtttgagactcctcacaaaagaaaagcagccaatgcaaacttgtgggaacttgagggaacatgtgcagagggatgcaccgcctgcctccaagggaactgacagacggctcttaccctctgctttatggccatccctcacctcttccctactcatcgaaaagtatttaaattgctttttctcaagtcctataagtgggttattggatgaagcccagggttcaggaaaagcatctactgaatatcatctgaaaaactttcttaaatttccgaggagctctgcacaaaggaaggcgacagctggagcgcggaactcactcattgcttgtcacacgtgtaatcagtaagggcgcagactctgcagcttctgcaatctaggagcgaggaaagaaatggcaggtgaaatcgctctttgttgctataaatgctcctaaatagaaaagggagaactgatggtctacagcagcgcatctgctctattgtatccttgagtcaaaggttggcttaactacgcccttgcgtctcctaggtccctctccttatgcaagatgacaaattgtcagtgcctgcgccaaagggcagcaatatggagaaccacacactaatgtcagccatctcagcaagaaaaatattttaggaaggaaaagaacaacaacaacaaaaatggctgttcataagacatgctaattaccgaagggtttcataagttctgtgtgctacacttgttttgattgatatctaagaccgctaattccaacacgtgtaacaggtcatcaataatctggagatgcaatccaagctagtcagaatggtggatctcggtgctccagtgtgaagagctctgtactgccaagtacttcaaactaaaagtcactgggaggcagcatctctcgctttctcctaatccagtccccacagatacaggaaacaaaaactagaatcctcttcctcaaagtcaaaccagaatgcctttctgtttataaaagccagacatgaagaagccctcttgacctatcttgtccaataggaaatcaaacaccctcactccatggaggtcttgtcctcgatccaacaaaaggagatgctgtgcaagggacagcaagaagaatctgataaacaggtttcaggtttagttctccctttggccttatacattagatcccgctttttagtcagatctcattgatatgaattgtctactcttccaaaagagtatgaaagcacagttccactgggccccagggatccattctgaaggcttccatgtcacatgaacgtcaagcaaatgaatgagcaaaatttcctcttgttaaattgtctgttgttatgggatgttggttatgaggctagtgtgtatatgaacacatcacgcctttctgcagaagcaaacattcagaggaattacatttttaagaataaaaattcagtctcagaaagacaaattgcatgtgttttctctcatttcgtcctagattctgcgttgatagattaaatcatgtattgtgctggtttgactaggtttgacccccatagactcatgtgtttgaatgtttgacccatggagagtaccactaataggaggcgtggccttgttggaggaggtgtggccttgacagagtgattggttgtcaggcaggctttaagctctcctatgctcaagctccacccagtgtggaccctagtctcctcctggctgcctttagatcaaggtgcagaactcttggttcctccagcacaagtctgcctggatgctgccatgtttcccatcatgatgatagtggactaaaccgctaaaactgtaaacaaaccctaactaagtgtttgccttttataagagttacctaggacatattgtctcttcacagcaataaaactctaagacatttctggagtatgtatatatagcatcaaagaaggaatgaacctctctggagaacaaggaccctgggacataggaaggagcaagatagatgggtatgggttaaggaatatgttcagtgctcaatatatactgtacaaaaattgaaaataggaataaatatctccatttcattatctcacagatgaggttagacacaaatataaccatatgtcccaagtttattttcaggccagcaactgagaaatctgaatttacttagaaatatcattgattgggtgtgataaatggtgatagcaagttcagaccatcattacaccaggctatctcaaatatgtggaaatgattttcatagtagccctgtgctcatgaaaccccactacattattaagtccttcgggactagtgccttgacatacagatccaagggaggaaaagaggaaaagactatattaagttgggttttgtttgggggttctggtttggtttgggtttgggttttgtttttttttgtgacagggtctctctacatagctctggtgtgctagagctcagtctgtagaccaagctcaaattgtccaactcacagagatctgcctgcctctccctcccgaatgctgggattaaaggtatgcactgccttgcctagccagttgccttgcctattaagtttacctgggtagtttctgaggcagttgctgagaggctcagggtggggaaactagaaagatgccctgtctttggagccagtgactaccccaaggatggtagattgtgtgtgacaaagcaagctactgtgtttctgagaaaaggtacagaatctagagggtgacattggactctcagaacattggaaaggccactgcggtggcatgtataatatttttagcaaacatagccattaaaataaatgacagctttctctcgtttgtactaatcggaaccacctcatgctggtggtagaaaactagaataaaaagctaattcacaggctcaattcagacagaatgttgggtcatttaggggtcatcgactcaatcacctatattaaaaaacaaacaaacaaacaaaaaaggtccccaaggggagggaaatgaaatgacttccagtaaatgaaacacagaagtcacctggtacccatttcatgttctccttctatgaaatctggcttcttccatccttggaacctttggtttctctgtgttgatactcctgctgggtacgtaggttctgcccctaacagcaatgcatgtgagataaggaccaatagcttcagcccaagcaaaccctcgttgatcacccatggctcagctgcagcgcctttgctgccagagagacgcctccctcttgtccaaggaaggccactcctggcccagcgcaggggccccgggtacttgcctctgagcaagcacaagctgacaggggcagagcggtaaacatcctgcgagcgctgcactcacttaatttgctgaccatctgattaattgcacatctccacacttcagctcagccccagctaaacctctgcagcttcttgccaaaggcgtctctaaatgtcctgactttttttttcctatagacacttaaaaacctcattaactaagagagaatgtttttaaagcagccagatagtgttttatccatagccttgagtgttggaggttataaactcttatattcaacaacagcctctataggacccatgccagggctcctgaatgacataccagtggctccaaagggctacgcattagcgacccagatcttcagaagcaatgtctacaaaagacgtcatattaaatggagtcaatatcacttccatgttccagcaaaaatgttccaggataaaagaagcttaaagagtgagagagatgagtgtcctcagcttgcttgcatccaatgggactcggccatataggtgataaatcccccagtgttagtactggatgccggtcctggatacgttttcttcatggctgaatatttggcaaattcctgtaactgttactatccctagtttcagttaagagtgaaggtaagagcaactgtgcccttgcaggctctgctgtgatgattaaagggtcccggatctgtctgggaagacggtgcagtggctaagaagaagtaccactccttcagagggaccaggctccgttcccagaattcacgccaggtggcttataactccaactccaggtcatctgatgtcctctcccagtttctcaagacatacgcatgctcacacacagatataattaaaaatgagagaaatcttttccaaacgtatttagggtatgcattagaagctgacaagctttggtagcaacccaaatgactttgccaccgcttttcataagacaaattggaaggagagttttagttgtagataggagaaaaagaagcttggagtcttttgcttctttaagattctgggtccctctctaggccacacagcttccgagataaagcattcatatacagaaatggtctttactaaaaggtaaaacaggccccggcacatgtgtggtcatagaaatgaggtgaatcagaagtcccaagtcccttagcatggtgtgagtgtaaagcacggatcgtccactatcatatcccttcatccttggggtgtcacctgggaattgctccttcctgggccctcagctcagcctcaggtctgatctacactgagcagggtgtgaaaagtatttgcccaggtccagctaaatcagttctgtacacttctgcctccgccagcctatccactacaaatgcagttcctcagtaagggattctctgctcacagggacctcagttccccctggcagaatccctgaaggctccaccttcttagtggacccccatccctatgacttgcatcctatagcctcctcccatcctggttcctcaggcctccatatccacctcatccttcatcccttccaactggggtcatttccttgaccattgttgtggatttgatctaatgcttgtattatgttaattgggttccccaaattgcaagagaatctgcaagtaagacactgaaggtccctgcccccagttagttctgattggtaaataaagttgtcattggccaatggccgggcagggagagagaggaaggactttaggatccatgggcaaggggactgagagaaaaggatttagaatggccatgctggaaaaggaataaggtgtgggcaagagagctacagaattgagagccagggaagaacaaccccagcctgccccctccccattgggtctagggcagcgaagatgtaatatagattttagtaagtcataactcaggagtattggaggggaggtgttggccacgaggaggtttgggagtggccccaccattgagctgcttagggcatattaaaatataaggctgtgttgtctttcattcaagaatccagaacactggggagggatagcgaggaactttcacccactgctgctactggggtgttttgagcaggattaatcaccttctgccacagactgttagatgcattcaataaaaacaaacacacaaaagtctcccactttaatcacagtgttccttaatcatttctgcctaacccagatgagaatatctttctatttttctgagacccaaatagatgcatgtgcacctaaagacaacaccaagagacctgcagaggtcatgcacgttttccataattttaagcataattacattttatagtggttgctactcataaattttctgtggaaaatcatttcttaaggatcattgcctattggtgcagtgcattttattaaatacatgataaagctgggcaccgtcgcttctgcttgtactcctagcactctggatgtggtagcaggaagactacctgctgtgcgttctaggtaatcctgagttattttgtgagagtctctacaagtagatatatgacagatagatgatagatagatagatagatagatagatagatagataagcggataaatggattgtactggctagttttgtgtcaacttgacacaggctgcagttatcacagagaaaggagcttcaggtgaggaaatgcctccatgagatccaactgtaaggcattttctcaattagtgataaagtgaggagggcccattgtgggtggtgccatccctagcctggtgatcctgggttcgataagaaggcaagctgagcaagccaggggaagcaagccagtaagcagcatccttccatggcctctgcatcagttcctgcctccaagttcctttcctgccctgtgtgagttccagtcctgacatcctttgatgaacagcaatgtgaaagtataagctgaataaaccctttcctccccagcatggttcttggtcatgatgttttgtacatgaatagaaaccctgactaagacatgggtagataaatagatgatagatagatagatgatagacaagtagatagatagatgatagatagatagatagatagatagatagatatagataagtagataagtaggtagatggatgatagatagataatagataagtagataaatgatagatagatgatagataggtagatagacagatagatagatagatataaatgagtagataagtagataaatggataatagatagatagatagatagatagatagatagatagatagataggcaaataaataattaaacagactgtagaaacatttgctataaagatgttattcttgctgtgtcatctttagaatgaaattaaaattgtagttaaatccaacccagagttgaaactaggacccctgataagcagataggtccaggaaagaccgaagtggaactaaggaccacagaaatgagatagaaatgtaggtgggaccatgcatgctagggactggtgttccaggggaagggacaaagctgacaccttgccttggtaacagaacagccagtccagagggaggtaggagtgagagctggtattcagtgtcagagagagacagtgatagctcagggaagttctctgtctgaccccttcttacttcagagcaggtaacaaaataatactaatcagaaaaatgtatggtagatacatttcttaaattaaattaaggggttcaaatagaatctatacagcacaaaggagctctcattccatctttcgaagatttctattggttaacaggattggcctcaggcagtatatgagtcaccttattggtggacacagctttcttagttaatcttatggtaatatgctcttgttagatttttccattttttcccaataccttttgaggtcatttttaactcaaatatgaacatgagaaaaaaaataaaccttagagatactgagggacttgtgggaggccatagagctggcagatgccataggaaatcactccatgtactgattccatctccagtcctgcctgctgtcatcctcgggtgctcactataactgttggcaccatctccagcttcctgcaaaggtacccagtggctaggaccgacccatgaaggtcaggttcccatacctgcagcattgacttttcaaagcttgttataccaggagaagcctcctgtggtctactgtagtgggtaaaggaatgatgaacttaagcaaagaaggagttaaatttaatacactaacagacctaagggtttacatgatggaggagaggttataagccaggatggtcagcacagaaactcctctctcctatatggcctgcaggttttcagggaatacaaaagtagtatacataagtataaactaaagacaaaacaaaacatttccaatacaatttttattttaaaaaatattaagccatggtcctgagtcatgttagtagtggtatatagcatgattgtatgttaaggggctttctcccttacattcgtcttcagaggccatgcgaaactatagcatcaccaggttcaaatgtatttgaggactataatcaccagggaactttgatatcagggagtctgtgttcttaatggaagaaggaacaggacctgatagaggccatggagcaaggcacaagccatgcacatcaatgcatctcctgcaacaatcagcagccacacccgacatgggcagacgtatatataccaggcttggtggcatgctcctgtaatcctggccagaaagaagccaaggcaggagaccaaccagggctacacagagagatcttatctcaaaaccaaaagaagtccaaaaaggagagagagggagagagagagagagagagagagagacagagagacagagagagacagagagagacagagagagagacagagagagacagagagagacagagagagacagagagagagacagagagagacagagagagacagagagagacagagagacagagagagtgagagaagagagagaggagagaagaaagagagagaagaaagagagaagaaagagagagaaagacagagagagagacagagagagagtgagaagcacaaatattcaaatagtgataacaaggataaattagggcacacagggaaaatggtagccacccccaactgatatcataactgattttgaacctgagacctcaccaaagcgcctcatgaatgacaacttgagggtagttatgaacttgaagggcaggaggaagcaagaatcaatgctattggggccattgctgataatgtacactcccagagcaccgaggtctggggaaatcagtgtgacatgtcatgtccctggttcactcctgatggctgcaatttggaccagtctcaaagcacagctgaatccctaagagctgttcacgtgcatagatctccactcttcaaggtgttccttgccttccaaacaagagcatcttcagccctgcccctcctttctgaagcagctgactgcaccaatgtctgcctgttcacttgaggcattcactcatcaggaatttgacctcagcacctctcctcactacagaccttaagattgaaaaggcctctctggtcttagctcttcaagttggtttggctcctatgaccaccctgtcctggcctctgcatcaaagaacagttgttgagttctgtccacactcaagaccttgggagagggggagagcaggaaggcgggtttctaatgtctgagaaatctgacacctaatgaaagttaaagaaaatgtaaaaagaacgggaaagcctgggtttactcacctctctgttcccaaacactacttccatctctatggcaatggcccaggagctgccttttagctggacagccattttagcatgtccacaaagacacacctctttgctaaagtgctcagagacaatgagcacacactagaacccactagcacctcttggctcttccatctctacgataccaataccacaacctttcagtgaactaacaaagcctgcaagactggtaaaaaattccagggcattaaggaaaatagtgtatttttgcatccattcactcccagcagaactccctttaagttgtctgacagagacatcatttttcacgtgtaaaaaaattgttgaagacaattgagtaatcaggagaaatggaactaaaactgaagttagctgtggcagggagaactcagcaaaaccctggcaggtacctctccagtctccaagctccaggacacacaatgccctggtccattcagttgtgacaatctaattcaggtctcattctcccaggaggtgatcgctgatccagatggacaccaagacacctcgtcttcctggacattgaagccagactgccctgcaggtagacactaacattcagctccctgtgtctgctgccagctagcctggccaggagaggagctgccacatgccttgagccaactcctgggttgcagggtatggccaagagccccaggactcctcaggccattcttatgtctcaggacttaaagggacagtcagagtccagctctgctcccttgctagaactgggggactagagcacaccatcacaacgctatcggaagcaggcaaaggttaactctaacagctaaggactaataacagcaaaaacaatcaccatctgtattgagcaggcaaaagttaatggccttcagtggtcaagaagctaacttagcaatgcaacgggatgggaaaagctatcacaacaggatcctacatttccagagagcatggcagaactacgatgggatttgttgccactgaaacatgtattagaacttgcctacagtgaggctggttattgtaatggcaaatttagacaaacaaaccagcaaacgttacttagaaaatgtggccctgacctcagcatgcatttccactgtactgtcaatggaaaccctcaaaaacacctttttattcacccataaaccaggaataaggacaacacacaatcctgttcttgtgcaaattctaagaaccccatgaggtaatgtatatgaaacatttgtgtaatgggcaacgggagtctaatacacactagcttttaatagaatgtctacttagatctccccacaaaggtggatggaagagggaggggggaaaaggaccagagatgagccacagaagactggctgtcaactatagctggtatcaccaagtatcaggtaagtccttccccgctttggagttgcttttaagatcatttcagactggaatgcccactaacccagaaagcaaacagctagtctactacgaagtcacctcataaaaggcacaggggaagccagataagcttaaccctctgcgagacaaacgagcctttggcaacacgtttattctcaccatctggctggccaaatctcagttcttctgtctgccactcatccccctgttcccgcttgactagctgtgcccctacagccacaggaggctgaactgaaaggccttaaatgccatccagcccaggtcgggcttacagtctcagtttcatcctttgaacgcctagggaactgagactgtaagaaactgacgtgtttccaggaactgaacttggaggctgtctgtgatcttaacaagatgctggttttcagggttacctgatatgacttcctgcttcaacccaatacatactccgacatctgtaattatcagagtattagtgtgagtgagatatatgaaacttacatgcttttatcctattctgagtagctaatgatttaaatagaagagggaataattatagcccacatcttaataaaatttaagttcttagaaaatgtgaagccccagccaaaaatgctagcagatgtagtatatggcaaaaactgacttcttgattcagagatggggccttccctacctggtggaggggaccacaaagtcttcttcaggcctgtgggctctgcctctctaacctatctggaggctccatgttctaatagcatcactttcagagttagatttcatcctaagagttagggaagacctcagcaaatgctatcatttgaaccttactaaacatgatggcagaaaaatagaaaacccagttgccattagggcagagattggtatatcctgtttgagttaagttatacagaattatgttcacaattctgaaatgtactatcaattcacagaatacaggtcaaccactttcagggacatacggttgcatccaaatgaacacaaaattacattctaagtaaagtcataaccgattggaatttcctttaacataggatttaaagccattgaataagtgctctgcaggggtgggtgggtggtacacctggaggcagaaagatcaggagttcaaggtcacaaggccacccttggctaaataatgaatatgagaccagcccaggctacctgattttgtcatacacacgcacacacgcacacacacacagagagagagagcgaacacaagggaaagaaaaagctattaaatcaattaactataggaagaatctcatgttcaagaggatggctctttggataaagtatttgcctcacaagtgtaaagacccgaggtcaggtcccccaaatccacataaaagttgggcaggcacagcagctacctgccgttccagaactcaggatcagggcagggaatccctgaagcaacatgcatagctaggcaagctagaagggcaagctcagtcaggttcaaccaaaagaccccaccttagtaaataaagtggaaaggaaagggggaaggtacttgacaccaatttcatacacatatatccacctagacatgtgaatacacacacacacacacacacacacacacacactcacagacacatacacactcacactcactcaccacacaccccccaaaagttcagagtttcttgatctacaagacagacactacgctcttaataatggacaagaatctatgatcagactttgtatgatccgaatccctagaaatcttatgaactaacactgtccacgatgactggcctcctgggcccccttctgtgttctctcatcttccactactcaataggagcattttccagtcacagccaacacttcactgtgatcatccatcccaggactagcacaccgcacattttacttcataggatgttcccagccaatcaacagtgcttgggggtatctttaggaaacttagaggtgggcccccaaaccctaacaatgccctggggaatactgatatatttatgatttgatgaccatgtcttgaacactagagccctaggatataccctatgagcaactatactccacacaccaagaccatcccctttttttctaaaatgcttgcaatggtttaggtgtgtttattttgaaatgagtgttatggcaagatgccttggtggataagaatgcttactgtacaagatcaactatttgaattgtattcccagaacttacataaaataaataaacaaacacgtgttccatggtgttcatctataatcccccagtcctatagggagataggactatagacagtggaaccacttggaagctcacaagccagctagcctggagttgacattatagcagaaataagagaaaccagaccctacctcaacaaaggggaaggagagatccaattccagaaagctgtcttctgatactacagtatgcttgcatgtacacagtcagggacacacacatacaataataatacatttttaaaagacgtagtaagtattatgataaatcacatgggatcatctattcaatcagtaaggaaagaaatctacttacaatacattgtgccagtccctaaagattaaaaaaaatgaataacagaatcttatactgaattaatctcttcatctgtctactcaccagctgaatgacctagaagaaaccatgtaatccattagtgtgggtttctcttctataaaaggaagataacactgttcgattcatgaggccgtgagaatatgagacacagcggtgtgcataaagtcataacactaaggtgttggatgcttattggcccagagcatatcaattgccatattgtaattgatctcatggttccaagagctggtatcctctataacccttccaccaaaactaagtctagcccactgcttgctttctatagcatcactcccagccactaaacgttggcctgcttctcttcagtagcgcatcttagaaccttcctccaggacgttcagtggaactttcaaatctctgttctgactggcttcttagcccagtgttaaagaccttgaatttagcaagtgacctcatttcccatggccctttcttcccattgatttcaaagcgtgccccacaatcaccttttgttcaataaatattcactggatggctgaattttaatatcaaggtttgacatttgtaaagtctaaacttaaaaaagaaaaaaaaagacaagttgggagttgtgtattagaatctgtggcctgctttccctccaccagaaattcactgttctttgtcatggcgaccacccgtcacgtcacatccctggctgctgatctgaggtctttatgctgccccttgatttatacacctgttccttaagaatcatgacactgaagtaattgacactaattagcccttctcactccaggttcctcctcagggctaaaggctaataaggccaaacacattctgcctctgaaggcacaaagggtgactgaggcacgagagatgggtgggaatggacttctggctctccctgaaatcccttgctgcctttcgctctagtatcagactgtgcttccagtccagcagcctgtcagtctggcagcaaatccactggggctgaggtacagccaccctgaatgctttcagatcctaggtcacctgaagggttgcttgatggtggtgaccctggagcctcttgcccattgcctcctccaggtgccgctccacagacaagattaagaagaaggttctatttaaatttccaaaagaggcactgccctgcctttttgggtctatttaaaatcctcccggcagctgcagtacataataacaaatcagagcagaaagggaggagagggaagaggagggaggaggaaggaggaaagagggggaggaaggaggaggaaaggaggaggggaggtgatctggaacatcctggattgtttcttgtgaaaatttgactgtcagaggtggcaggggtgaggaccccttaaagatgcccccgccccctgctgtgacagtaagggagagaagtactcagcagagacagggaggcaacttaggattctcatgtgaaaaaaaaaaaatctacaagatgcaaaattttgctgccagcctgaaatgtatcccagacccactctgatgaacccaggggactctaaccaatagccagacagtcacatgggtaaagggtcaaccagggagcaagagccctggaaaggaacctgatcaaagcctgccagtgttgctccttgatttggcattccagaattggccagtggaagacccagacagctagtgactgagtgatctcttttacaaaacagtgtcccctctcccgcccccattgacaaggccttgcatggtggtggctttgatgatctggactgccttcctgtccacttaccttactagatttccacatcttctttactgtctcgacagcaaagaagttttatgagggatactcacagcgtccatccagctacagagcacagtcatcttcctgtccatgttccagcccccactccccacccccaagagcgtgaacctttgtgaacctcactgtgactcatatcagaactcctggccattttctcacacttcttcaaagtgatatcaaaaaagtcagttttctgcactggagtggcccagagcatatcactcacatgccagggtaagcctcatgcccagatgaagctggccagcacaaaaaaggactccgtgttcttgtgtgatttttatcttgttttggtgtggttgggtaattttttgtcatattgtttttgtttggttgggtcttgttttgttttgtttcttttagagaaagaaagaaacctgtatatgtacaaatttagttacatttaattattaatcacgatcttcttttagtttccaaactactatcctgtattttctcctcaaggtgtctttataataaaatgttaacatcactgaattcataggcacagtagttaccaaatgaaatgggcaccatggctctgggcagcatattattaaattgagaaaaaaagggtatgtattaactgatcagtttgcttctagagatgaccaaattgcaagcccatgttaaaagggttagctctgaatataggtcatgagactaggatgttcgtaatgattcaataaaccacctacatggcaaatctcactttctattgcacacagtttaaatactctcagggagatatgtttataaattgtatgttacataagatataagatatatgcacacaccatacatagaaattataatgtgtacacatttcatttgcttcgaagagaatattctagtagatcagtaaatgttaaagggtttatacaaattaagaatgaattccaagagactttttctactttttcttttgtttctggttggatgcactataagagatttataaagctgtccctaccaaagacacagtaggcaaatgatgcatacaatttataatcaaccagatgctgccatatcaatatatacatcctgattataaatatggatttagaattaagtttgatatgataaggacagtaaatattcacagaccatattatgcataatgtactaaatgaatatcatctgcatacattgacttcataaaacaccctgccatgtgttcagatcattatctctgacccttttaccaaaactaatttataaaaaattaccatatcctgttagtctctgtccttctttttcattcttggatgttttcctagaaacattactgaagaattccaaagagcgggagcacagagtaatgtaggctttccaacatgagtagtaagtaccctgacacctatccacaaatggccaagggaacagacgaccttgtgctgacttcccaggcaggtggagagaaaatgaatctaccctttgttaagaaagcaaatgccattggccaaataaaatggttcaataaaaataaagactacaaagaattccttttgcatgaagtcatggatgaagaagtcaacatgtcaatttcaagttatcctttggaaaaacatttcaaaggaaggaaggaaggaaggaaggaaggaaggaaggaaggaaggaaggaaggaaggaaggaagaaagaaagaaagaaagaaagaaagaaagaaagaaagaaagaaagaaagaaagaaagaaagaaagaaagaaatgtagccatgctgagctgccccttattcaactttccctgggagttttagcaaaggacccatacccagaatttctgtcccctctggtctctagggcatgttgtaagacttttgttaaactgattttgctctagtcttagaaactatacacacagcttagacaaagagttgttactctgctgtacagacttctgtacgtctgatggagtagacagagatcccctctcaccttggttcatctcttcttccatctccttggtacccaggcatgcatagctccatcagatgtttatggagtccttactgtgtggtagttgctctcaacacaaataaaatatatgaagaagtctaaaatccagatgaagaaacaaatatgccaataaagaatagcagtaaaccaacccagaaagacagagtgaacatcttctacctgaaagtatcagctgaaacggcagacaagtcataaaagcaaaaaaagaatcatgtagctgataagtgtattttaaaagctcaacttacgtaagatttaaatagtagtgttttactttcttaactatgcaaagatatttttctcattattataaaggtagatgaagtgaatattgtcacatatttttgctaaatgtgaatgctacttaaaatttctgaaggtcaatgtgaaaatacttccaacgcagctgacacaattaactaaacaaatccagttatatgaatttacgataaggaaataattaagatagacaaacaatttatttacaaggatgctaatcatcaaatttttataaaaacagagttttaaaatattaggacctagaaagatgactcagagttcaagagcactgaccagtcttccaggtgacctgagttcaattcctagtacccatacagtgactcacaagcatttgaaactacaagtttctagggatccaacactctctctctgccctctagggctaccaggcacaaaagtgatccagagatatatatgtaggcaaaatgcccatataaattaaattaaataacaatattttaacaacaaatgaattatttaaattacagaatcctataaagtatgagaaatgatgcaaaacatctattagaataacattatttacgaaaaaattaaaaaaggatggatacaaaacaatatgtatagtattgcttggttttggttttatacccagcacaaggaagatacttagaatgctaaccgctacccaggagaaagacggctgggtgaacttcttccttctcgtctgctctctctattgtgtatacattgctttgacaacaagaaaaataaggttgtactaagcaatgctccttccatatgtgcatgcgtgtttgtggaagtcagaggacgacttccagcatcagtcctcacgtcctcctcacctttgccttgtttgagacagggtgtctcatgcttgctgctgcatataccaggctagcttgcctgcaacattttgggactctcctgtctcccaccttctgtctcaccaaagagtagtggaattatagataaaaattgctgcatcagtgggttcctggaattcaaactcgggtcctcacacaagcataagcactttacccactgaaccatatcctcctgctaagcatgggggagggagaggaagaggagaaggagaaagggaaggccatgtgacagaagtgacaggtgttgctcagttctgtgtataataccctgccaaggactgctgagacagactgacttaccaggtcaggagacttctgaagccacactccacctctctgtcctctgcccatgatgtctacccacaatgctcatttacccaagatatgcctttaaaaacatctgttttacaaagccaaagcctctctcaaccaaggctaaacacgatgataaaactcaggcgattgtgaatagacgaaaagctgtgtttctgagcatacaacacagcaccacaagccctgggctctaaaatggaagacacattcagaagcaaacaacagctcacacaggatcactctgtgcagagtccacccttgtggacatcgtcttccccctgggaaatctactgttgaaaggtgtcaaccagccagccgggcccctccacgcctgtgctccatatcagctgtcaggttcataagtgcatttactcattattgaccctgtgtttatctctacctcaaccacacacattgcatctctccgttggaatatgtaatcctggggagacaagttaaaacctgcgatgctttagtatcttttctgggatctgcccatgtctgcggctccagcagtcctttcttgccacaagatgttcctgtttgtaagcaatctatgcaatgttcacattgttctccatagcttgtggggtttccccctctacttcctggttttagcagcataccaggaagatcagtgttccactggtgttctgggttgctgttcatataactttcaattttatataccttttgggctgtctatgattatttggggtcttcataatccacccccacccagtttagagtccttccctcccacacaccttcaacaccaaaaagcaacacaatagatccaaagtggttattcttaaaagttcacattttccatttcttattccagtctccacatcttagttgagtgttctctccatggctcccttgtcctgccctcctcttggtccttgtccttccaggacatctatgccagagcactgccctctgcttagtctaattaaagcctctttctgagttcatatataacacttagtcttgcagctcctatggtgctgctcaagagatttatactatacacatatggttatgtcttatctcctccaataaatctcaggctccatgaggtctcagcaaagggcctggaagcagtaatgtccaccgtggacacttgagatttgtaaaaaaatatgagcaaatgaatccaaccagggttcactgaaatcccagctatgaaggcaaggacgcatgtgcgcaatggatcgatccctatgtgtctttctgcactaaaccagtttcctggactactgggtgatacattgattcctgtttgtccccagtacacacagagaggtacacaaagccttgccccttttctgaaaatgtcagtctactttggctttgatctgacatattttaaatttaggagtcaatttgcataatcttttagtatttatttagtacataatgctcattcagagctttgtggtccttgacgaattatcctcctgaaatgcagatcagtgttgttatctgtttcacagttaagaatctggagcccgggacacttcaatgacccacaaaggcacaaagacaaagtcgatattaaagcactcatgcacctagacaaacgtgcctcagcctattcccactcaagccaggtaggtccccagggtccccaggagacaacctcagaccataaatgagaccaaggctgggaaaatatgactaattgaaaggtcaaacattatcttaacatgagagaaatcacttgttccattgaaatttatgtcgctggcgtacagtgtagtgcaagatactggatccccatagtgaggtgtttatttctcttaggacattaagtattcaaactattaccctccatgttagtaaaagtgcaaaaatacttggaattctttttgtgtttttacttgacgagtaactagtagacatctacacatgcattaatagtatacaaattatgttttgaaatatgcatatgcatatatgcatcatagaatatttgggcatatgtatgtgcacacatgtatgcacagtgtatgcaaatgtgttgtagggtatgtatgtacatgtacacatgtgtgtacaggaaagaggtcaacctcagatgccattattcagacagccatccagtttgacttttgagaaagggtttgtcactggcctggaaactgctaagtaggctagactgcctgagcagtgagcgctgactgcatctacatcaccagtgtgtacatcacgagagagtgtgcatcacaggtatgtgtgcctcacaggagtgtgtacatcacaggagtatgtgtgtgcatagcaggagtgtgtgtacatcacaggagtgtgtgtgtgcatcacaggagtgtgtttgtgtgcatcacaggagtgtgtacatagcaagagtgtgtgtacatcacagaagtgtatgtgtgcatcacaggagtgtgtgtgtgcatcacaggagtgtgcagcaatgctcagctttttcacgtggattctcagaattagacccaggaccttacattttcaggaaaagtattttatcaaatgagctacggtcccaccctcaagaccaattctcatcagatggctcttctgttgagtttgagtctttgcagtgtgaatattaactccttcacaaatctatggcttgaaaatacatacgttctcccattcagaatgcaatcacttcttgttaactgtttccttttctgggaagactgtttcagttcagtgcaacccatttgcccatttaaaaaattttgtgatttgtgctctgaggatcatattttaaaagaaatctttacacccagttgtggtgttggacccctataatctcagattttggggaacagaggcaggatagcaaattccagggtggcctggtctaccaagtgactttgagggcatcttttaatatataaaaccccaccaaaaagaaaaggcagtggggggtggattcctcatatgaattaaagctctaacacctttcctcctatattttcttccagaatgttgacagttcctggacttacaatggactctgtaattcaaataatcggaatcttgtatacgggatgagagaagtgtcaaaagtgtttagttcaaattctactttgaaaaatactgcctgccacttagatgtattgaccgtgctttgcaagtaagagtacttcgaacaacgataaggcccatccgtcttcagctgctgtggcttcccttcgtgtcccagcagcttagttaacaggcttggcttaactgccttcaggtctggtagtctcagacagtgtttgcattccttagtgttgttctagctggacaggacaacttcctatcctcccctttagccctaatgtcacggctgtataagtgccagtaacggatatactccaatttccctgtgaaaatgattcagggtggggagtggcagctgtgtagacaggagtgtaaagttctgctcaacacttttcataataagccctagaaaacacagccactccgccactggcccacctgtccgcatcttacctcatgcagtgtctttcgcttggctctcccctcttctcatctctctgaccagtcaccttgcctcccctcttctcctgacagtaagtaagctctcctaggcaaggatggattctcaccacagcgaaatttgcctcaatttcaatcagccacacagagggggaaaatgtccaaattaagctgcttgattacagaaattaatcttgtcatttagcggccccgttctgcagaactgggcctttgattagtctccttgtttccgaatactacaagcagacgtttattaagcaaaggcatcttttttatagtcaggaaagccagagggaaagtaaaggtatagagaggcttctaaaagaagggcaccgagtcaagggtcctagctcactctgggtccctattctcccatagcaagagcgcatggaagagggacctcaagtcttgtacaccacagcaggtcgctcccccgagtcaacgttaaggtgcagaaagaggaggcctcatctggtttgctttgttttgttgtttgtttgttttgttttttagtagtgggatgagctacttgatctagacagccaataggtccgaatagcaagattccctgtaaactaactacgtggagtcttgttctgcatcgcacattctgcagctctggatgctgttactgcccaggttgagcaagtcattcatatcttatgaaggcagcctgagcgcttggagaagaagatgttctgtggaggctattctccctcccatcagggtatactacacacacacacacacacacacacacacacacacacacacacacatatgggaggtggatgtgtggtgcatgcaggtgtgtgtactggtgtgtggatgcatacgcttgtacacgttcacatggaggactgaagtggatgttgagtgtcttcctctatcactctgtacattatatattgagacacagattttcccagatctggtgctcactaattgggtaggctggctggccagcgagcccccaggttcctcccgtctctacctccaagcactggcaaactaggcacggcatactaccttataaggctagtgatgatctctggtcgttgagcatgcttgcacaacaagccctttacccactgagacatctctgcagatccacaacgcacatttaaactctgcaggggtgctaaccgccataccacatcagagggcttcccagacactctgagtcttgggggcaggactttaagtatgtcctgagagcaattctcaggaccttctgtcagaatagtcttctcagggcttgagagctttgctctcacctctgcagaggaagtcaggcatgacacaatggagtcattcagggcttaaatcccaacacctataaatgactgcaactacctggagggcccctctcctctcagataagcactaacactaccagcctacagaccagacaatgcaagaaaaagagctagccttcaacaaagactagcatatcaatggactccatctccttgcatagtcactaacttgttctgtgagagtgaaaaccacaatgtgccctaattacatttgtaagaagactgggaatgcaaacagccctggcactgagcggctcaaatttggacccacagacacttttgtgaactagctatcaatgtgggcacttgaagcagaaccccagcttccaccaagtagagatcagtggcaccctacctgaagctatgatcaccagcattgtcatcaagtattgacaagagtgacctgggggaaaagtcagtgtatacacacacacacacacacacacacacacacacacacacacacacacacacacacattctctctctctctctttctctctctctctctctctctctcacacattctctctctctctctctctcactctcacacacacacacacattctctctctccctctctttctctctctctctctcacacacattctctctctctctctctctctctctctctctctctctctctcacacacacacacacacacacacacacacacacacactatcttagtcagggtttctattcctgcacaaacatcatgaccaagaagcaagttggggaggaaagggtttattcggcttacacttccatactgccgttcatcaccaaaggaagtcaggactggaactcaagcagggcagggagcaggagctgatgcagaggccatggagggatgttctttactagcctgcctctcctggcttactcagcctgctctcttatagaacccaagactaccagcccagagatggcaccacccacaaggggcctttcccccttgatcactaattgagaaaatgccttacagttggatctcatggaggcatttcctcacctgaagctcctttctctgtgataactccagctgtgtcaagttgacacaaaactagccagtacacacaccaagcaaaaactgttgaaaaatatcagccccccccaaattccttactttcaaataagttcataccatattcttcaagaatcttttattttctaattgtgtgtgcacatgtgtgtaaagtcccacttcaccttctaccttggaaaggacttcctgttcaccaatacatacactaggctaacgtgaccaagggattctaggaaatatcctgtctctgttttctgtctctccataggaaagccagggtgacagatgcacactaccatttctagacgtacgtgtgtcctggggatccaatctcaagtccctgcgtttgtgagctaaatgttttacccactgagccatctgccaggatgatgttaggagaaggtggtatgataggaagaccagagatttagagatccaaatgtctatcaagaagtctgcttcatacagtgtgtgtgggcacaactggaacttcatatctctgagctttcgtgccctcattgcaaaatgagaataacaatttcctgataggaaggctttgctgaagattaaaagacagaatgtgttcttgccatctggctatatttggagaagttaaacagtactagttattattttatttctaaaactattctctacgacaaaaccacttgccaaagtcagcacctgaatgaaagtcttaaccacagagatggccaccataaatgtttgtttaagaagggctcaagtacggagaggaaggttggagtaaccaaaacctaccagaagttgaatctcttgaaggcaaaacacattgtgacataggagaactaaatgaataaggaatatgtgcatgattctaagttggcctcttgttctgctatggggcccctaccacccccacctaatcttcacgtagaaatcgaaagtagaggcctcctttgtaaccacatagcctggcatcacttctctgcacactgagggttggatccaggattctcatcagggcagtcagcctccctaatctcacttctaacctcccaactccctctgttctatgggggagatcttttcatacctgaaaggtcacccctttcctgtcatggggtatcttgacctcctgtgctcacccttcatgactttaatgaaatgctgtctctcccaagagaccttcccggccaccatgtctcaatgaacctcattaaacgtcatgtttataacctcaatcacacttaatctcctaaacctccttacttacttcgaagcacacaattctttctcaaatcactatatatatatatatacatatatatatatatatatattgcttgctgccttccactgaaaggcaaacttcataaaaacagagatcccgtcttgcccactcaggatccccaaggcctattctctaatggatacttaataaatatctattaaataagcattattggattaatacatgatcattctaaagggcttataattgctgaaagaagcctattttttttcctagaagctcatttctcttagtagaagaccccaagacgcgaagtaattcccattgctactaaatgaatgaagggttgtgagcatgtgttatactctggacttgacacaaaccaaaatcagaatctgtgtcactctgcttggcagtttttatacatctcacgcttatgaactgccaagcacatagtaggcactcacaaatgttggtttcttttgatgaccagatggatgagaagaacacaaaatagcactcatttttccaaggcttggaccttggaaagattcatattgatcccccaaatcctggctcaccttcattccagaacacctaatatattcccacaaataacgctataccacctggtctgaaagtccaactctatgaactgaatttaggtaccagtgttgcaataaaacactggctacatgtcacatcaaggaagactaatgtattgcatctatcagcaatattcatttatctgatccattgccaaatatagaagccagccaaacatgaaggcttcagttcagggaaatgaaattggacacatatcaatgatcaggaaggggatataaggaagatgccaaaatataattgacagtataaaaatctaactctaaccatccagttccattctgcaagggacagctgccactaacaaataacctagtcttgtaaagtatatgttcacaatgactacagaaacatcaacggtcttatccttgcttgtagtgacatgtgtactatattactttcctggatgctgaaccagccatattctttcaaaggcagtactctctgggcttgatgtatagacctgcaggatccaactaacagaccagaatgatgggaaagcagaaagtggaggctgacattaaggcttgtgactggaacagggcacagagatcaatttctatgaggaatgaaggagataataagggaaatagatgatggcggggtaggaaatgctaaatttggaattattgatcagtcttgagagatttttttctcaacatgtgaaatttggcaaatggatacatttctgaaagtgggatctatcactttctgcagactcttgagagccctatgatcagtcagtggccactgttttgtggaactctcaaaagtgaaaagtaaacaatctatcatgaatttcagggtatgatgatagtcacgggctcagagttagaattttaagttaataaatcaaatagacctcaattcaatgggtatttataaagcttgcaacggtgaccaagactctatatatcataatacttctagatctatgaccaacaaaagaaactgtaagaaattataagggtgagtttcttccatgtaggaacaaaaattagcaaaatatggactgaaacaacttctgtgaccaaatatttgaaatgaattttgtttgcttatgatattagcattttctgatacctattctttctgacctccatgttcattggtacatatttttccatttcccttttcattttattcagctgaatctatttaaattttaagtatctcccatgagcaacatgatatccagtaaagaaagattagtataaaaaccaaacaaatgaaatataaaatagaataattaaagagccaggatgttttcactgttaaacctgagacatctatggagagtaggccacaacatctgtaagaaatggctatgaggaaaatcaatgcaataaatagcatggtcagagatcttgatcaggttgtctaccacaaacatgagctattgaaagccacaaactattcgcatctgggatggaaaggtcatagactttcccttaaagtcataagggaagatagcagcttcacaaaacatagctaactggtatccggaatgagacaaataattgggaagttggagagaattttatttaaaattgaaaaatcaagaaaagtaaagaccaaaagaatattatttaatgttatttagagttttccatttcgatactgaatagggaaatcataacatacaggcagggagataagagagcagaaaggagaagtgtggaaattggcttggatcacaggcattcctgtgcttcttagatgctaggtcctagcaaccagatgcaggacgagagtaaaatgtctgttagcagcaataacaacagaatcaaaatcgaaatgaaatcagcagtgttaagaagagcccactatgcaccagtgatgttgggatacccaccctctctctcaatggctcttccacaaggttctgtagcttacaggaagctgaagatctaaatcatgaagacactttcatttacctgggacttagactaactccacagtgctaattccttcagtgaggtgtagaataagtcagagtgcatcatcatttctttttaagaaacattctttggcatggaagagggagaggcatgagttacatagataaacatatttaaagttctcaaaaaacgtgaaattatcaaagaacaaagttaaaatggggctattaggttgagtcctatcatagtttaaatgacaaatatccctgatagacctacaaattcgaacacttggtcttcacctggtgatgcctttggggaggctatagacatgttatgaggaacagctttgttgtttggcgcacatcactggggaggctcttgagaatttacagtctcaccccatcttctgttctctctctttgctgcatgtttgcagctgaaaacatgttctcccagatttttactctcaccaccatttctctcctgtcattttggactctttctctgaaactgtaagtcaaaataaactccttcattaaaaacagcagcagcagcagcagcagcagcaacaacaacaaccttatcaatacatgtattcaatctcacaaaacaggtaatgaaatcacacttcaggagtttatttttctgtgtcattttaatcagtctgaccagtctctccagtggagaaagatgaagacttgagtctcatatgtgtgcctttatgacatacatcaccataaaccatctattgagcctacaagtcaacatggcctcagaagaaatagtggcaagcatgtgacaactgaagggaaagcccagaatggctcgatttggaagaaatggaaatgttaaccgagattacatcttaaggaaggacagagcagaggtcaaggtttggttgtgtggagttgaggccaggaagctgaaggctcaaaaccattccagacaagtgaaaagaaaaaaagacaaacctctttcctcactcaggagctccccagaacgagctaacgctcagtgagaaagtctatacagggaaaagacacacatggcccttggtgttggcaaagatggcctacaggtcagagatgtgccttttctaatgtgatgcttgctttgtgaagtccaggctttatgacacttcactgggccattgtgtgagccactggtctatttctgtaacaagatagctgtggtgagtgcatctaaaggaggagagatttgtttgggatcacatctttggagatcttcgtccatggagtttgttaactcttcttgcttttggaccgggagctaggaagcgcaccatgtaggaatacccagagggaagtgccaccagcctcgtggcatttggaaagctaggagaagctacaaagtccaggatcccagtagcctccccacaaaggactacaacaaagagtcaaaatttctcccatgagactccacattttacaggccccatgcaatagcactgtgtgctgggccctaggaccttaccatgggagcctttagaagatgctccaaattcaaattataacagcatcagctacaaatggccatgaggctcagtcctaaggaagacatccaatgagtttcagagaataactagagtcccttcaagccactaaatctgttctttaccattgtagctttttctcaaacaaacaaaaaaccctgacagtcccttcacctaattttttcttccatgatcaaaatctctttaaaattacagtaccaacccttagaacaccccaggaaaagtggagtgctctgtgtctctgcggtccaaacaagctaacagttgtatgtggttattgagcctttcagctgtagctcataacaactgagaatcaatattcagctttatttcatgttagttaatttaacttgaaagagccacaggtggctcatggctcctctattagccattgcctcagcttccaagcggagagaagcctggaattttattttgtggttcttcttgtccatgaatactatttctacttccctcttaactttcatctctttgagtttttaaatctatctttaaatgtcaaccttgtttttctaggttttgtttacatttcacttttatcttcagttaaaacatataaaattgccctttgataggtcaaaaacccagctcagtatcagccgtccttctctcttttcggctttccccaaggccattggtcttctttgtttggaccaatgttcagcagaattatgtagagatggaaaatgtttgtggccaaagaattaaaggacagacgattgaattgtggtcactgagaaagaaagctttcttcaggccagcttgatatactaagattgagattaaacagcaacatttcttcaaattaaaaaaaaatgcaatggtcatatggttcggcacatgaagacatgattctaatatcacagaaacaaaaccacagtaagacattattgaaagacaataaaatatagaaactaatgacacaatatggagggacttacaaattccttaagcagaaatttattttaaaataatttgataattcaaattaggtctgatgtcatagctactctgaaggctgaggcaggaagattacaagttagaaacttgcctggtctgcagcatgagtcggcgccatcctgatagcttagcaagactcatctcaagacaaaaagtaaaattactaaatctagagtggtacagtactccgctagcgtgtgtgaaacccaaggttcaatctactgggaaagaaggagggggagaaagagaaggaggaggaggaagaggaacaagaagaagaggaggaataggaagaggaagaaaacaacttgagtgggttgttaactgagaaaagaaatgggataactgaaatgggacgattaaagaaggtaattgggagatgaatttgggggaaagaagagaaacggagagagggggagacagagagagagagggagagggaacgggagcaagagagagaatagcgtatgtatttatacagggagaaaatagaaaataccaaagaaaatacagattcacattctaataaatgccctttgggaatgtttctctacaaaatgacaagcagagtttgtctgtaagcctgtgagtataagcttgccagtttttaaagtctaacaaaatgagcaaaataagcattccctgtaaactagcctagtctgctgttgttcacaaaagctcattttgcctatttatgaagtaaaaaggtagggttgaaaccctcattcattttctttctcccattctcaaaaccatgcctgtagattttacccattttctttcctctggtacttgtattcatgagctgcatttgacgtcattcccaacactggaatctttccattaaaagaacacaagcaggtggtcactgcaagcacaatcggccccccatgtcgggagagtgaacacccgtgcacacacgtgcaccgccccccaccacagtcccctgtgtatgaagggtttctactgtaacccctgccagccatgcacacactgtggagaaatttgcataatgaagaacctatagtgactcaaccatgaccggcgtcctagcccacatgtgccaaggcatgggaagcatgagatcacggtgtgacggcagatcccgaaacatactaagaaaatgggagcaaaacattggcccctgtgataccatgggacttagcaatgctacaaaatgtaactggtaaaagggacaactcggaggaaaactaactttttatcctctatcctgatttaaaaaaaaaaaagtgggagagatttttaagattcagaatttacccctgtgtttcagactatattcttatatttaacactccccctacttctaagaggccagaagaataggtcacacaaggtgacaatggtaaagccaccatgtggatcagatgccaggggctgcactggagcccatgctatatgaagcatggaaattccactccaggaagaagaaaggctcgggacctggtttccatagcactaccatggagacagctctcagtgactctgcctccaggccctctgaagccaaagcatctcccctttctctccaacacccacctctgtatcaccatgcctccagccccctcacaaatgattaaagactgctgggaaggcaggggctccgccaggcattaacctggcaatcttaatgcacatcggtgtccttaaaataagaggggggaaaagcaggtttcttcccctttttggtgcaaagggaaagacaaaaatgagaaaatgaaaactcatatcactgaacccctgcacttaaattgcaaattttaaaaaaaaatcttgccaagttatgtattaaagacataggcatgctaatcccatccactgggtacattatcttctcttctctgcctggcatgccagcatgcaaatatgaaagatttaattaatttagagcatccaagaggttctccttaatctttaccattgatgactaactggagtttggtagggttctctctctctccctccttccttccctccctccttccctctgtccccctctgtcccctctccactcctatctcttggttgtcaatatgaaactaaactaaagctgggacttggactctagactatggtagaaatttctacgtaaagaatcctgggctctttagcacgttcttgtgcctcaccctgcccctcttccctttctgcagtggctccaggggaatgagcgatggcgagcctgtagtgcactgatctggactctggctgggcagagtgactccatcccatctggagtgatgcccactgacctggagcaaaagaaaggccaagaatcctgttagccagcagatgcttgggaacttgacagagcatgtgagaaaggctgctgatccagctgaccagcctgcacacccgccagggattgcagttgagacctggcaatcccattcctgagttcaggtcttcctccacgtttaaatatgaatttagggcaactggcctggacacgtgtgcattgtgtgaatacaaaaaggcgtcacggctgagaggaccctgaagatccggctgctgtttgatatcattgagggggatacaagagtggaaagcttaaacaactgctgattggaaaaaggctggcaggttttgaacctccaaatgggagacaagcctgcacacacacacacacaaaggtgtgtgtgtgtgtgtgcatgtgtaagcaaagaggaactaatgtcagactgagtctccagcagctcaagaatggatcttctggggcgactcacgaggaagccctgtgtctatatctttattgctcaagctgagaattctcttctgcctgccttactgagcactgtaaaatggaaagcaaagccagggtcggtcagaggcaggcaggacagagtgagatgacacaggagttctgaattattcattttgatttatgtctcatagtggcaattgttgccactttctgttgtttctcctgaatgttgaaattgtaaaaagaggactgaataattcggcatgactcaagaaggcagccagtgctggcaaaataggttccttttgtgtttagtctgaacattcgtatgatatattggtttgtaatttaattaacaatctatgatggccctaatgagtatggtgatatttgcaaagcatttcagtgttcagtgaaaaagctgaatggtccgaccccctttattcttatcaaaaaacaggaaggaaggaggacccagtggcttggagacaggagcatggctgaattcaaggctgtttctgggagacatcagagttcacccattccaaaatccatagctgctgcttccacatctgtgctgtctaagcatcttgcctaagctctcttggaatcacaaaatccatttgttcctcttaaagtgcttcacagggcacaaacacactgtttaaagggcgcaggtaaaacacaagggagcagttcagtgtggaggcattcagtagttctagggagaggacactcattgccttgtgattgccagccactagggctggggatgtctcagccgtgccacacaagcatgaatccctaagttccatctcccagaacccacaatcaaaaggcagacctagcacatgcacctgaaatcctagtgctggggaatgggagacagggccatccctgagctcaccagccagtttagcacaactgatgagctccggattcagtgggagaccccgtttcaaaacatatggtaaagagtgactgagggagatgcttaaactcaacctctggtctacacacacacacacacacacacacacacacacacacacacacgatcacacatgatcaccagccatcaacttagtgtccctccacagagtatgccacaatagaggctactcggcatccccagacgcgcattactgccacactgcacagccatggaagaatacattcactcctttgaaacaccctgtaggagtgtgatgggacgcaatgtgtcaatctgagtttcatgtgttggagccttaagcctggtgacttcagactgtggcttggtttggacttggggcttttgaggaagtgataaaatttaagtgattgttagcacgtagaggaaaacccatgtgaggacatgggtttaaggtggtcatctctaagtcaaggaaggagagacaattgctagctttatatgggagtggggaaattgtatttgttgtttaaaccatctagtcttaaggattgtcttatggcagtgtagacagccaagagagggaacagtactacaccctcctgaggaccaggcataggtcctgcacacatgcaagatccacatgtaccttgtcctacatctttccaaatacccaaaggaagtaaaacccgtgatcctttatataagatggtagcaggatatgtttttgatgccaaaatttcagattttaataagataataaagtgtcactgccaaatatttccaatcattatcctaggggtgtccggaacaagaccttttaaggtatcatgcaaatgtttattccatgaaacataaaaactataagcgctattcatttcaaattaagtgggacatacttgccgaatgaagcttcatattaggggagattttaatgcttattgagttacagcaatgccttcttttcaaaacctgttggatttcaaagtcttgatgaaggctctcatctaccttctaaggaaaagtctatgaaatgagatcttgaatctctaggttggcagttagatgacgtctcttctggtgaactggagcaaccttcaaacaaccttaaacactctgcctggaggctccactgtgcttaggattctcccatcaggccgaactccagattgatgctactttccaaaatctctggcctttttcctcagtatccctgatttctaatggatgaagcttccacaagattttattgaatttcaggtgataaaaaaagacagataaacagctacacacatcctactttggctaactagctcagaagtttccaagcctccagtagagttcccaggataccctgaagagactccatcttgcagtcgaatacctagtgagcccccaacacttgcacctaggaacacagcagtgtgtatctttgcctttccatctttaaactctctgggaaaggtctcttctttggcctgcattaaagtgtgggagaatgttgtcagtcacctgcctctccatccacccaaccaagcttcatttactctgctaagcaagcactgtctttacctaagccctgcagatatagttctaagcaaagtaccagagcttcttggaaacctttgcactttcctcttcaacagcacgggtccctctccctctctagtatccattgtacttcatgttaattgtagtgtctgccttcctaattctacttgaaccctgttaagggagaagcagcatcttttgattttttttcaagtatttagcacaatgtttggccttcattatggagctcagataaatgtttattaaattaagggataaatgaactggcatgagggagaacttggccactaagtgctgtctagtccatctttgagctgtctaaaaggcaatccgttccctttttcctgctcctctgctttcaatgatccttgtgtacacgtctgcagcagaggcacttcaactggtcttaccacccacaacagtctgccctcccctcactgacaccaagaaagactttgtactccaccttccatgattatttgggaccaattcaaacatcatttctcacatgagttctccaattccccaggcaaatttatcctgttcctttgaaaccaagcaagaatgctaagtgccaggacagagggatcagttcatctcttgcacacgctgtacacacaatacacattctacacacatcatgtattctccgtacacagtacattaggaaggggccattcctggggcccaaatattaatcgtgaaatgcagttctctaccttcaagaagcggctgtgaaaagaaagcacccggggaatgccatatacaagagagagtgaactggcagctgaaccacagaaagtgggtagtcccagggaagacagggaggtagaaaagaagctacataagaagagaaagaaccatgtatcccatttcactgttcaccagggaccagtcctagactcatgtactaaccttgatcatttggccattcagaaaaaaaaaataataataccagtcatgtgaaatattccctcgaagccacatgtgattgaatgagatgcaggcaagatcctgaaattgtcaacagctgagttaactcctcaagaatttcaagttggccattctatccaaggccaaatttaaaaataaataatccaaacataggacgaaaaatatgcagttagaatttttaaggcttataaacactagtgactttctttattatgcaggataaatacaggaggacattaatagttaaaaagctagcctctaatattctcaaagctggacatgaaatatgttctgactttagcataagtaaggtagcaactcaaataaaaatcagagacttaattgggtttgcttgctgcaaattctgttctctggactgtacatattctctcaagggctaggcttaaaataattgcagttttaaacacagcagtttctaagggaatttggtgtgctaaaaacaggaagaactatgtaaaaatgatggactttaatttggttaaaataatggtgcttttttttttctagtaaatttgactaaaagcagtcatataatctagtgaattctggactatggatttagctccatgttttccagttagacggtccagagttgaattcctagcatgagggaaaaataattctaaaagtatctgtattaattatttctctattgatgtgctaagaaacaatgaccaagacaacttacaagagaaaacatttaattgggcttaaattgtcatgataatgaagcaactacatggtagcaggaacaacagctgagagctcacagtctaatccacaagcaggaggtaaagaagctaaatggggatgggaagcctcaaggctcattccagtgccaagctttctcctgcaaggctacacctcccagtccttcccagacagtcctaggaaacacacacgctatgctgtagtcaagatctaaactcaccaggttctagaatatggtttggggcctacagataaaaacaggacacagtccatccaagtaggatccatctggtaagaccttgcgtgctcggaaagaaaagaaagagacaaagactaataggatgagcagtttaaaaagaaagcttagagtttggagttagactaaaggctcctaaaaaaaactaaagttgttttccaaaatattcaataagtcaaatactttaccacagctctattaaattctacaaacaccacaacaatgacaccatcacaaactatctttgtccgtttatctaataaggtaggataaacattttttactgttttatttttcaattacttcttttattttttaaaactttttttaaaaaattacattttcccctccctctctctccctccaaactcaaactcttccatatacctctcactgctttgaattcatggcctctattttgcagtaattgttatttggtacacacacacacacacacacacacacacacacacacacacatcaccaccaccaccaccaccaccaccaccaccaccaccaccacacataaatgtgatttgtataacgctacttgtacgtatgttttcaggactgaccatatggcattaagtaaccaattcctgggccctcccctaggaagactttctcctgctcccagccctcctcagttgtctacagtgctttgggtagggttgaaggcttggggcctttttttccagctactttggcatctccattggtgtcatccttgcacagctcaggtttaggaaaccaatcagtgaaacttgacgagtggaacttctgacattacttagagacacagtctcatagcaaagtccctgatcttctaactcttacaatctttctgtcccctcttctgccatgttctctgggcctttttatgtctaagagttgttttgtagatgcatctatgggactgggttctacagtgtgacgttttggttggttggttgtgataatctagagaggtttctgtctggtgcaaaaagaagattccttgctgaggggttaaagctacatatagcataaaatgttgattaagaaaaaaactatctctactcattgtattttcaattagaatataaaaatgttcacacatttgccaagttttttttaatagggacaaagcctttctttggctattaattggatgactgaacgttttatattttttacatagatactccaaggtcacaaccatgcttcccagttttcagttctttatggtggtgacctcataggatcatttcttggtccatagtcccatccaattatgctggaaacatttgtggaatgtcctcccactgaaccttcactgagaagcaagtgaagttaaggcacatattcctttctaaaccctgctatgctccattatctttgtgcttgttttcatgccaataccacactgtctttattactgtcgctccattttaagttttaaatatggtcatgtaagtcctctggtcttattctttcatgtccagaatgacatagacttttcagagcccttgaagttcccccggaactttttataatgacattaactttctaaaagaaaaaagttttacttatgtaatttttcacacgggggctcagtgacaaggactcattatttaaatttgagtggtatacaactctctgtataaaccaagctcacagtggtctacctgcctctgccttttaagttttgtttaaaggtattcaccatcatgcccaacccttatgaaaacattttaccagctaagagatgaatcgcaacatgaagctgaggagaagttaaatattaaaacatggattctctagatcccttatgtttgcttagaaatcctctaattttcagctttattatatatatgttactctatcttattgtgtggttttgatgttactatgaatcatcatcacctgttaatatataaaagataactgatattcacatactgaatttttatttaataacctttctaaattcatgcaagtgctcatgattttatgtaaaccgctttaaatgttctaaaaatgaaagatcatagcatattaaaggtagttttactacttcttttactatgggtgtgcttctaatctttttcctatcttatgccatatgctacaattgctagtgtaatgctgagtggaaacagtcaaggcaagcatccttgctttcttccccattttagggcaaaaccattcagtgtttcaccaccaactacgatgccagctgtaggttcttcgttggtaattttatcgagaggaaattcactcttactttttattacaattatctgttcaaactgacttcttgcatctatggtgattattgcatattctgtctctcttccccactctatggtgagtttcactgattgatcttcaaacattatactaatgtagcaaagctgagatgagatagttcttagagaagacagtgtatcctccttgtgtctttctggatttataattgtgaatacttcattgaaaacgtgtcctttccatgttcatgaggaatatttcttaaatcttatctcataatgtcaccaggagaatactgattgtgagttttacaatgttcctctttgttttatgttctggaaagttttatgtaggcatttctcttatatagtagatagaattcaccattgaaactttctggctttagatcggtgagaaacattttaaaggagaaatagtcttttgactgcatgtggagttatatgagtgattgtttttctgctttagagagcttttacagttttgtgcttttcaaggagttttctcatttacctaaactgccatggttattggcataaaggtaattgtttgtttatgaatctttaaattactttccaatccaaagtggtgtgcctctttcatatcggatattggtaatctgtgctttatctctttaattcttgctatttggggagatatttttaattttactgggtctcatctaagttctagattttggctttattcttcaattcttgtttaaattccatctcattgatctcttgttatttttattatttatttcttcattctgtgcttgtgttgttcgtactatattcttcacatggaagcttaggtcattaaagacttttcttctcttctaacctaaccttataagtctccaaatgtctcttactacaatggctgtattagaccaatttttatatactggattttgttacaattcaatccaaaatatttctttttgttttgtttttgttttgtttttcgagacagggtttctctgtgtagtcctggctgtcctggaacttggtctgtagaccaggttggcctcgaactcaaaaatccgcctgtctctgcctcccaagtgctgagattaaaggcatgtgccaccacacccggcccaaaatatttcttaatggcccttgtgatttcttttttggacccatgtgttgcttagaagttcattgtttaattgtaaaggttatttgtttggttttttttttggttttgttttgttttgttttttgtttgtttttgtttgtttgtttgtttttttgtttttgtttttgttttttagcagacatggctctgttgaattctgatgtggtcagagaggcaacttttaaggtttcaatcagcataaatttataagactgttgcatggtccagaataccgtatctgttttgtacttttgccctaggatctcttggtgaagtcctctgacaatagcttcgaaaaaaaaaaaaaagagccagttcaaaataaaagaggatagattctcttctcatgttgggagcacatgaagaagtgatgagacaacaaattagaggtgagtgagcttggacagaagaggacaggagatgagactccggtctgcgtggcaggactaacgtaaattacaaagcacctgtccctaactcccagggagaaggggaggcatgtctatcagcacaccagacaatgactatggtctgtccacagctaagtcctatagactcttatcaggaaggtatctagtaaaagccagagctttacagagagaggtcttacaatcctgagagacatccagagcaaaaggcatgatcaagttcacacagccaggcacatacctgcggtcagactgaatagtgctatttttgtaactcatcaccatgaagacctttagttaagaaaactgccagaattgtaagaatggaaacaaagtaagtgtattcatgaatcgtctttgagaaataggattttccaatagatgatatctaactttgtggtcctccatgaacacccagagatgctatttctttcatctcttcatgagaatgggaaccatcgaacaactatgaaatgattgtaggaaagaaaacaaatgcctgaccttttctccttcaagtccacacattgctttatctttcatacacactagtctgtctttaaataactttaatagaggaacaaggctgtgtacctgtggattacaattcgtgtacttattaacccattatattagttactttatattgtaaatacctgagaaaagcaacttaaggaaggaatggttaattttgtctcacagttccagggcatagtccatcatgtccaagaagtcatgatggcaggaagctgaatggtagtcacatcgcctatgcaaatggcagtcagaaagagacagatgatagtgcccaggttcctcttctgtatgtggtccagaacctcagcccacacatggcgctccacagacttagggcgggcctttccacctcagttaatctcatctagattactcctaacagacatacccaggggtttagctccttcatggaagcttaggtcattaaagacttttcttcttttctaacctaaccttataattctgtcaaatgaccaacaatagtaactatcacgcatgttatctcctttcttcattgcagatgagaaacaacaacaggatggcactaggcatacacgtctaaagtcttgttttgtactgaagcagcctgaagttacatgtgatatgctgaagtataacgtcttagaaaatcctatttctccaagtagagagaagatgaggcatagacaggaagtcccaatatatgtagcatcatgacgatttcccctgtccaacccatcactcatcacagctagacattaaaacaaaatgcaagctaaagcaagtgtcttttaagttgtgttgctgacagtagaagagctgggcatgggtattctcagtgtccccagcttttggggatcctttcttccatgccaggagcaggcatacagcttggatactggaaatacaagctcaggcccaagagacatgaagaccaggtgagggcactgaagcccacgggtgagggggatgatgtcagttcacactgatgcacagtaacacacagtaatcaataggcttaaagggactgagattgggcctgtgaacacaagcaataggcaaggacaggaggaagtggcgagaggttcacgccaggaaactgacagctacacacacttacctccagatctcttcagatgacccatgccctggccacctgttagtaccagtgatgtatcctgtcataacatatttccactctctctcctcactcaaacttacaaagactgtatactgacatatccagaagcacaaacgaatctgacggtgattaagagaaactaatagcaggccttgaatgagcacaagaaaaagtattgtgacaaacattagagtttggagcccttcagagaaatctgagctcccaagggaagtctctacatagcaattctgaaatccacacatctacgtgtatacttttttttttcctcctgatgatggtgaataattttttcttaacttacttttatttattgatactggccagtaaaggcagatggtcaaacttaaacaaagacagcaaagtaaaaatgaaatccatacatgaaaatagagtctaagaaaaatgttattgtttcaatggtaagcgtctccaatagtctctggcatttgaaaccttggcccggggttggtggcactgtttgtaaagtctcagtaggcgtggccttgttggaggagatacgtcactgaagggacattttgagagttgaaagtcatgcatcattttgagtttgctttctctctctccttcccgcttgccgtttaagctgtgagccctcagctgctgacccagccaccgtgcgccaccgtgcacattgctctctgccttgcctcaaagccatgatgggccatatgccaaataaaccattccttatataagtcgccttggtcatgatattttattacagcagtagaaaagctccataaaagaaacttgtaatgttactgagactcgtgtgtttaaaggaaaaaacatattttatcataaaaataatgtgatacatattaatcatgggaaactgaacacttaaaaaacaccagaaagaacattttgactacctatgctgctatccagaggtaatagcactattttggcatcttcatgccaacctctttaaatgctaatatcatcacaatagtacactgttcctgtctcctgaaagaaacacacacacacacacacacacacacacacacacacaccctcagtaacctccaccaccacaatggatttaacttccaaggcaagggtctatccgatttacttattatcattctctgaatatactagactcaatatttattgactgttattacagcctgctgcttttcatgtatttatggaaatgacattttcccatttcattaaatattcttttgctttaatgtaattttaatgattgtttatcatctattctataatttcattgaactatcccttcattgctgaacacatataaagtgcttcacattacttattttgacaaataatgttagagtgactatctcccaaatgattatttttgcactgtcatgggatcaactggtccgcattgaagaattgaatgagtacgcacagcactgccaaactgtcttgcacaaaggttgttctgatttaaattcttaccacaaattcacaagagtgactttgcaacctgattatgtaacaactttaagtacttttatctttggggtgggacttcttactgatggataaccacatcatgaataaagaaagcagaaggggaagggaggagagtcttccacatatctgatcattgttgatgttgtagctatttatgttgttgtgagattattgagaatactgccctgtgtggtgcttgatatatgaaaattattctttttaattattgccccttacactgaacataaatataggctgtggctttttattaacctgtgagcatggcatccatctgaacttggcaaataccaggctattgagacatatcataatggaaatcaaatagtcagacagctgtagggacttatgagaactctctattgtccaggttcactgcccaggcctggtcctcagaagaggaacctagaacctctcttagacattgagaattggccttggaaccttctctgtgccttcagaatcttggtctttatgtcattctaactgtgctctctagtttctccccgattcctagttcggttatttaagctggattcttttttttttttccatttttattaggtatttagctcatttacatttccaatgctataccaaaagtcccccatacccacccacccccactctcctacccacccactccccctttttggccctggcgttcccctgtactggggcatacaaagtttacgtgtccaatgggcctctctttccagtgatggccgattaggccatcttttgttacatatgcagctagagtaagctggattctttaagagtatgtttcattaagcctgtgttccactgttgtaagttacaatgggtttgcctgtataatcattgatcccatgatactgcatatatgaaatatattttctctgccctgtcttcaacactggcctaagacgagaatgccaccttgttgccagatgataagaaaggtttagcaagtggtgggtaacaacctcttcataactgaggaggcctcgatggcctcattctgctggcttcccaccacattttatacactaggaaagaatattccgacttcacagcatcagggattgtaagtgacaaccagggagaaactaggatcatctgaactgccctccccacccacacgccagatttctcctcagtagcaaccaaagagtaaacacccaaactgaaggtcattctaaaagtgctttctgaatgtgatacaaaatctgaaaatttcagtggaaggctcctaccattccctgaaacatacacacctctaacttgcaatggcaagctagaggtgcaagctgaaaatatagccacctacttgccaacttttggagatgtaacagatcaatgggaagatctatccacagctctaggtcaaactccaaaagcaaatcaaaatgccaagtccagctcacagctaagagctcgtctttcaacctaagtgcaaatccattagcagccgtgaccctgcctggattgcccattctgtcatggctgccttgctggtgaaccttggcctatgacagcaccctccttgtttacctagctaattgtgttggcgttctcccttcacctctctcacaggtcaaggaacatgatgtccacacagttgaatcagtgaccttggatttgctaaaggtgataatcagggcatagagaggggaaggcccaaattgctaaacagcgctttttagccaatggtttcaggaacggctactaaacgccctaatgggtaagacccatgattacttccttcaaaattgatccctatcccatctcataaatcaaattgcttgcttcaataaaaaaattctggtgaccaagttattttccaaaatgactgtcccaggtacttagtaataatgacctagttctcctctctgtgtgtgtgtgtgtgtgtgtgtatatgtgtgtgtgtatgtgtgtgtgtgtatgtgaaagagagagagagagagatttcaaagcatgcctgagctcattcattcctctgaacatttatcaaaagagtcttttctaattggccttaatgtaataataaagaagcagaaagggatgcatggtctaccttgttctctccatcctctttctctctccattctcatccagtctataactttagggtctcaggtagcctactgtgaaacagaagtaccccgagggaaagaaaggccaccattgtccagcctgccctcattcttttctcccacctttctctgtgcccacctcctccctcctaccttttgaacactgacagcctctgttgttctctgttcctcttcctgttgcagtgataaggtacaaaagcaactttaaggaggaagggtttattctggttcacagttcaaggtacagtctgccataatgggaaagtgtaggtaaggagctggccacacagccgagaaacagagcactgtacgcatgctgctgctaagttcttaggtcatttagatagctcgggatgccttgaacagggattgatgccagccacaattagcatggagcttctcatatcaataaacacattaaagaaaatccctgaagtgaagttggcagttgaccctaaccatcacacttttataataccaaactttctgagagtatgtagtgtcctgggaccctgtgaatttcattgtcaagctggcacgatttagaatcacgcatctgtttggaagcacacatctgtatctatgaggctgttctcagaaacatgtaatggagcagaagagacatatcctgaaagtgggcagcacctttcccaagtgagagtcctggccaaataaggagatgcaagctgggtaccagcattcagctctttctgcttcctgaccacagataaaacatggccgccacctcataaccctgctaccatgagttccacatcacaatcagctatgccttcaaactctgaggtaaggcaaaccttgtttcctaagttgtttttaaggaattttgtcacagcattgagaaaaataattaaaacagaccctgaaatgccttgtgtgggaaagatgtttgcacccccattcacgctgagtccgtttatcgccctagtgtctcctaaagtagctgtgagcctgctggaaagatttgaggacattggaagtctaaacagcagagcatcttcctcgccacattcctctcacaaaaggctttttggtaaaacagaaattccttagtgtcacccaaaccaaacagatattaggtgcaaagacagcaaaagaggactctgatggtctcaagaacctccatgggcacagactgccagggacggggttggaggatgcatgtaggcagagcattgaggaagtataaagacccacccagctctgactacaggtacttaaattagcattctgggggagaaaagcaggcaagggcttaaggaagcaagagaggagggagggagggagagagagagacgcagagacacagagagacagacagagacaaagtgtgagacagagacagacacagagagagacagagacagagagagacagaaaggggcagagagacattccgagagagacagagatacagacagaaatagagagactgagagacatgcagagagagagagagacagagaatgagatagacacagagaaacagaaacagagacagagatggagagaccacatcagaaaaaaaaaggaaggaaggaaaagcagctgcaatgtgtcctaatttggagaacccggccacattgccatggcaaccctgaatcgccacaaggcagccaggcagggctttaaacactgagttaaatagtttaactatgaaaaagaaagaaacagatgtagggggctttttaaaaaaattccgaaagaaaggcctggagcctgcaaaggtccagaaagagacgctgtcctggcctggctggatttcaagagagatttcaagagtggagccaagggctctactctggatcttccttctctgatctgggcaggctggagactcggtatgtgtctatagctaacctctaccttaagaaaaatccccctaatgacagttggatgctaagctagacattcctcaggcatctgggcgatgctcagaactacagcccaaagtcaaacctgtacatcactctgaggccttgttcagtgagccacaggacacggtagtctcctaaaggcaaagatactgagaccacagagggctaagctaggcaatggtgtggctgcacctgtaacctatacatggcacactggcctatggggcctgtatgcctacacagttctgggctattgggggggagggagaggcacatttcacatgtttaaaacaagaaattaaaagccaccctgaaaccatgcctctgtgagcttcaccgtgtgggatgctttcagatgtaggcagcgatgacagcaatttggaaaagagttttcagagtggctctggacctttggaaaatatgaattagcatataaaactgttcttccatctggaacattaattactcaaattacacacttagtgttcgacattttgctttacctggcaaaaaggccctcgactccttgcctactgcagcccttttgatcttctgctgttaacaacaaaagttcctcttcccttacctaccccatcacatcctcttactcctctggtggggcccaggatctcctgtgggagctgagggtgccatgtgactgggccgtgtgggatcaagccagacagcatcgagttggtcatgccacacagccactcggtgtcaaaggagggagtggtgtgtgtcacaggtatccaggcaactggacaagctctgagatgagcttgggatggagatgacactgggatggagagtccattttccttgtagctggacaccagtaatgaacccagaagagctccgcttttcccccaggccacgttcatcatctcctttcttgtacatcaacttacattacaccccttgctctatcttcatatccccagctgctgtagctgaccagctacttcctcttttctgctctacatgagcatccactgagtacccaccccaccaacactgcccagaagcctaccatgtctctctcacggccaagacccaaggcaaatgacagagaacacatggcaagcttccctgggtcccatgacaaatgaaatcgggcctttctcactgtgagcccccttttctgagcctctccctgtcccctaggccagaccttttattaagtcttgtcccaaacccttaacttcttccatccggctccggctctcctccgtgcgaccattgagaaggttgaatgaaccatctattgcatggggccaagtgcctggcaacaagaagggcttccatctcgtcaagcaatgtgctaggcgcccgggcatttgtttcactggcaagactggcattatccatctgattggacagtgcggaacccagtgctcacaaaggttatgtaatatccgaagtcaaaactggtaggaactactaaatccagtttgatgctcaaagcactgcattgaatctctacccacttctcagtggggcctcaaattgcctccacagaagcatggtgttggcagagtggccagaaggtgacaattccaaggagtgctgaagacctctgcaaagcccagatagtgtctgcatggagcatgtgtatttatttgcaggctagcctctcctggagctactgtggcccactgcctttctaataaacaggatcaagcttttggttaaggaaaaacatcatgctatgtattcctgaactgtaatactgtcatctccaggccggtgcctgagtcaaccagagatgtgatggttcaggaggggcaactaagaggaaaggggaaactactttcctttcagtaaaattaaatgaggaaacgtctccatagcagagggacacattagataaacgggacagatgaatgcttaggtaagaaaagtagcaaaggagcaacaaagtcaggatccagggtttgctcaggcactgcaagcctccatgatcagcgctggggcggcagaatcagatgggtctctgtgagttccaggccagcctagtcagtatggcaagttccaggccagccagggctacatagcaaagctttggctctaaagctatgaacacgaccagagagacctccaaaccacctacggggaagaagttagcaataaatccaatttggacccttctgagtgactgctgagatgcccatggctgcctcagtcacggaagagagaacttctagctgaaattccccgtttctgagcaatttccagctccatcggattcctattctcactaagctccaatctcccttcctcacttctccagtttttctttctgcttcactgttgaattaacctgcacttaaggaataatagaattatcctgcattgtttctgcacattacttaaatggtttcttgtgattatagtgccaaccttttggccttggcctcctgctgtctgtctcttttccaccccctagtcccccaatcatatcttcgttctctcctatcaccccttcaaggatttacagggtcatgtcacctagccaactggtcagttgtcactgatgatcaggtatgacacaagagaacctctaacatggccttgaaggtaagggccagaggtggtggggtggggagagcagttggagaaggccaatgtcctacccaagaaacgagagtcactgaagatagctgtgcagctggaactgcaggctctcctgccctactctagacaagctaaggcatggagcccatctccttcccagctccatactataccaagcattccatcacttgcaaacctcacattaatagatagtctgatccactggaaagtccttatctgggagcaagtaaaatcacaaagtcccttagcaaggcacccaatgtctggtccacatcttatcatttacgctgccaatgcttaaccacgaggtgccaccaaggactcttctgtgtctcaaacttactgatcacactccagttaacccagccctggcacaggaagcacgcctgtggacagcagtgaagaacgccacactggtctctgttgcagcatggccggctgattttctgtcatccaaaatcagttatgtggcaacatgtccatagaacagagtcccggagctcaggagtggctttggtgactcacttacacagaagcaatgtgtggactcaagttttcccaatgaagggaatttgaaaggggtccaatcagattaaacaaaactaaacacacaatcagcacggcgaaaatctttgaatcatttcaattcctcctagccggagtcatgctcatacctaaatgcttgcacaatgctgaaagatgagcaaagcctcttacagacctcattttaatcatgatatcatccattatcatcttatggacagagaaattttggctcagaaaagtccagggacttaggccagagctctgcagccaacaggaggcgcagccaaagtgaagagccaggtgtcagggaatggtcttgtgactttacctcagatttgtgccacagcggtgcacagtcctcagagaaatgagggcaaacacagaaaaagcccccaaagaaccatgactaattcacatactaaagcaatcctctactgcccattcgatattgaaaattcacctttagtgactaataacctgtcacctcttttaatggatctatacagtcaaatgaaatatgcgtcatatcaggacggggatcataagccctccacgactctctgaagaacaactggcaaatggctgctggggaaaggggtgtcattttcttcagtgatgtagccactggtaagttcttctgctccaatgaataaccccatagccatgctcaggcgagcaacactaagaacggatccaggtaacagcgggtaagagatggtgaatgtcatcagatgacattatacacatgcgtgaagttgtcaaagaatacactttaaaacaaaaatcatagaaaatctgcatccgtatatttattcatttttctaagagctatggtatagatttatatttgaatatctcaaaagaaaatgcaatgtgtctcccagacgtggctgaggaaaatgagcagattatctaatgaaaggccagagcacttgtatctcaagcagtagagaaggcttctcctcctctctaagaggatattatgcatgccaccacagcaggccttgttgctgtttcatcctgctcctctcagttctgccccactgcacccttctctatcaccagggccagactcacttcctctgctaccacttcattcgatctaaactgaagcttgtcccagacatacagccagaaaacaattcaaggtcagcttgtaggaaggcaaaacagcagactaagacaggtaaacttccagagccgagagcagagccctggatgctttcgaatgataggaagtaaccgtgtggggcctgtaaatgcagggagactcttgagattggaaaccaaagacacctagttaaatcctgacagccattcactatgtctgaacctcactatcgtgtctataaagatggggtgtactttcttcctaagagtataagaaaaccaagcagtttcattgatgcagtatcaattagcaaatacaaataggtaatgaaatccttgaaatacaggatgaagtaagcagcaattttcaatgcagacaacttaccacctactacatgcaaaacatactaaatatttcttcattgatttattttttaaggacaataaacagctgctttttaaaaatgcaatgtctgtagggttttgtcttctcttgaatggtttgctctgatttatttacatatattttttttcttaaaagtcattgtaaggccaggcagtgatggtgcatgcctttaatcccagcactcaggaggcagaggcaggtggatttctgagttcgaggccaacttggtctacagagtgagttccaggacagccaaggctacacagagaaaccctgtcttgaaaaaccaaaaaataaataaataaagatttttttaaaaagtcaatgtaagagaaattctttcagtttgtttctctagaggccagaagcaagaagaagaaaaagtattcctcgctctgggtatgaataatgccctatattcatacctttattaagtaatcatagttttcctctttttataaatagacattgtagcaacatgagaaaactgtacatcaatgagctgttacagtattaactcaaagcaaggaaatgtaccgtttttctcagcccaagcagcctacttgtggatgagtgcaaggctcctgttggggttctttgatcctgaggatgactagatctgctctgggggacaccattctcctcttacagataaggaaaccgagacccaataaagcacaagttgtgttcaagattgctcatcccaaaccaggctatctcattcagtcttgttaaaacctctaatgaacaatacaaagattaatgattgtaactctcactcgagttttcttccctttacaagacattttaattaactaattagttaattaataattaattcactttacctttcaatatccatccctgcctcagtctcctttctgacagcaacccccccccaacttcacctccccttatcttctgcaaaggggaggctcacatagctatcaccccaccctggcacatcaagtctctgcaagactaggtgcagactagcctctcccactgaggccagacaagacagctcagttaggggaccaggatccacaaacagacaagagattaggtgacagcccttgctccagttgttaggggactaacatgaaaaccaagctgtacatctgctacatatttacgggggagagggggcaaccaaagtgcaagacatttttgaaatcaccttccctccaaaaagttgtgtcgagatttccctctctcacattattgacgaatatgtcaccaccgacagaaataaaaggctcacgaaagccaaggcagaacatccatcacgccccccatttcctcgtgcctcatcaggttgtcactggaggagagtgtgatatgccacagaagctcagggaaacactctctgtcacactgttatttctgtcacagaagcaggtgtgcacagtccctcctcacctgtcaggctggacatcgacaggtcaaggggcacaactggagtgagatcccgtagaagtaatatgcacaaaaatgctgcctctggtcataatgcttccaaaaccatgtatcaatgacaaagcctgatagagttaccattgagacatggagacataagcacagtgaagacagcgaaggatggcatagcatccaggtggcacagggaggtgtgttcaattggaaggggcatcctgcatccgataccacactctttccggttgtaattctactttcaatatccttttgtcaagaaaggcacagtgaggtgaggaactggctaaaacctctaagggacaacataaagattcatgattctccagccaccactatgagattagtaatttgagaaacttggtctgcacttccaccaagactgaaacacttccaacagaagaccagtgaaagaggatggccatcactgctggcggcgagggactctgagtccagaagatggagtaagactttgtatagtcacactctgtcccccatctccaactcagggatattggaattaagtctcctgagctgtttactatgtgaccctgggtatttggttttaattctttgcttccatttctcatcttcaagacatcagtgacagccatgtgctgccagccaatgcagaagatcagataggctttcttcttagagttctgaggtgatcccttagagtgcctaagttgagcatgcacactgcacacatgcacacacgcacaatttaaatgataacccatggaccttagtttctcaacctggacttcctcatctgtcttctgtgtcatcttctttggttcagaatcctgcacattagccctgagtccaaccctgcttctgttcattgtcatgaacatcaccgctgtgtcttcagtgatttgtaccatgtgtaacaccgctgtgtcttcagtgatttgtaccatgtgtaacccctaatggatacccaattatatttactgaatgaatgaatgaatgaatgaatgaatgagttaatcccaggccactttcctgggcattaattataagctaatttgatgacattatcaaaatattgacacttctgtgaaaatggggctgaagagcaagctggcatcgacagttcattatggaaagagggcaaacgtgatgactttccacccacaaaacagctgactgaaccggaatgagctagcttgaccaaagccctggcacactgcgggtgctctgaaggcaaccatcttcctttgccactgcttttctcattgtctgacaattgggatgttggggtggtgaatttttcctttttgagaaagtctgctttgctgctatcctaacactgcgttaaaaacctagtgtcaaccctgaaccaaggaataacaccttataaattccattgtatcatccattttattatgcaggatccacatacatagtacccaaggctacacatatatgtgcaaatattcacataagtacacacattcacatttatacatatgagcacacacatgcacattcatatacatggatacacacatggacacacacatgaactcatacatgaacacacaaatgtacacactcacatacatacatacatacatacatacatacatacatacatacatacacatcacatacttttagatttgggggtggcacagattgctagttactacaaatatgatcttttaattagctgtgtaaatgcttttaggaagacactcaatttgctacagttttattctctgtttctgtgtgtctctctatctaggtctctgtctctgactttatctctctctctgtcactatctctctctgtgtgtatctgtctctgtctgtctccgtgtgtgtgtgtgtgtgtgtgtgttccagttaaaagtttcctcaagtagagattagatatgtgtgtttttataaaatgtctggaccttcaggcatcatgggatattaaatccatgggacaggacttttaggaacactggagaggtcatggcatggtttaattccaagaacacggggtgggaggtactggctatatattaaacagccagaaaactgttagcaaatgaagcaccaggatttcgggagccatgcaaagttatcagggacatttttgaaagagtatttataaggaaaagcaggtacaagctgaaaatctatcaaaataccatctttgctgagtgtttttgagtccaacacaacttagatatttataagttgtttacaacaaatcatagacactctctgaaatgtgtcatattatgttggcgaggtcttctctttctgtttatggttatggattttatttacatcacccagtgtaaagtgatgtttaatacccatttcaaagccaatgccatcaaaatatattttagcctacattcaacaactctggagtaggccaaaaacctagtgctttttctcctcattatcaccttggtaagggtcccttgccaggacctggctaagagcacctatctgacaaagcttaatgaagtgttaatgaagggaaaatgtcccaggccatcatgggctttgttctgaaaaggttcaagtgcaccctgcaaaaggcttttggggtggttctttttgtcccctaagagaagacaagataggtgaagaagtacagggttggtttgctatccttggcttgcatgggttgtatagagctttgtccatgaattctgcccaatatatttgcccaaattttccaatatgacttttactcttaagaatgtagacgtccattgtgtaaatgtaccacattttctgtatccattcctctgttgaggggcagcttccaaatgctgacaccattgcatacactagcaagattttgctgaaaggacccagatatagctgtctcttgtgagactatgctggggcctagcaaacacagaagtggatgctcacagtcagctattggatggatcacagggcccccaatggaggagctagagaaagtacccaaggagctggggggattgcaaccctataggtggaacaacaatatgatagggtagttacacaatgccccccccccccggagctcgtgtctctaactgtatatgtatcagaagatggcctagtcagccatcagtggaaagagaggcccattggtcgtgcaaactttatatgcctcagtacaggggaacgccagggccaagaaatgggagtgggtgggggagtgtgggggggacttttggtatagcattggaaatgtaaatgaaataaatacctaattttaaaaataaagaaatgtaaataaagataatattcaatttgaaaaaaaaagaatgtagactccatacataaaatgtttttgtttgcttattcgtttgctttgctttcctggagtaacgtctcaatttccccattctctttccttttatcaaaaactcatcagccaatgtcaatagagaatttctttagtcaaatctcctaccacttatccaaacactgttcagcatggccttaactacagggctggaagaccgtttctagtcttcgtccttaagtgtagactctctccacctcaggtacctcatttaacttcttggcatcttagaggatgatgggatggactctgactcagaggactgcagacccacagctccacttggcacaaatagggagaactaaattaaggcaaagcctaaacattcactttgtaaactatgaagcatcgtatgtgtgtgcacttatttccctttgaaatctcaatctctgtccacaagtggtttcttgcagaccattctttcagcacagcctctcggctgcacatccattcccacacactcacaagtttcctctgccaagtgactcagttagaggaactgcccatatgaggagggagggcatacctacgttagctacttttctgttgctgtgataaaaaccctctgataaaaacagtttaagggagaaaggacttgttttgggtcactgtcccagagggatagagtcactgtgatataggaaggaactgcagcagaagcaagaggctggctggtaacacaggctctgtattcaggaagctgaacataaacaggaggtgcggccaggctatctagcctcacaagcccataacatctataagcaacatcatcaccactggaggccaaatgtccaaacatgtgagcctatgggggcatgcaacattggagctataatagtacctctgatggagaaatgggaagtgctacctttactctgcaaaaagttggttagacacagccactgggaatatgtcctttgattgctgaaacatctccaataagcagtctgttttatccagaggagaaagaaaggcgaaagggaaagcaaagcagttactccaagaaagcaacataaacaaaaaacaaacaaaacttcccatctgcctatttgtgattaccataaatccaccaacccccaaaatatataggccaaaaatctttcaagtgacaattttagcaatatctggcctacttattatacagtcagttaccccaggccacagtagaatgccatgcgaccccatcctaattcaagcttcccacatcttcctcctcagctgtaggcaggagaggggagagaaggcatccatcatgacttccacctttcagactttgagtaggcagtaggactggtaccttgtgggggttaaagccctatcagagcctgacctggtagtctagagaatcaggccagctcccggagagatcagacgcaaggcattccatctttcttggctcagcagcctcccctgtgaaataagggcattacactaacctctgagatgccctccaggctgaacagtcttccacacaggccagcaagacaacgtgccgtctaaacttcatgttggaggggagaagcagaagtgatttggaatggaaagagagtgtcctcccaggagtccattttctttccctttgtatactctgaatacccagtcttaaagcctgccaggcaaggatgtaaggtgaaacctcaaatttgaccacacctcgtcccatggcacaacagatcctcacttgctttgtctagttctaatccactctccccgacttcctctgcatcctttgtcacttcctcctcaatcagcatcctgtgcttttagatgctacgtatgaaccaacttgaatggattacaaacctcaaggccttcattttcaaatcaagacaaggaggcctaagagtggttaagggacttttccacagtcaaatagccatggctggttataaaacaaggaagcttggcttggtaggtcagcatagactctttccctggaatctgacctgcctctaatattcccattcagccagaggaagcaactcagttaagtccctccaaaactaacaacgtcaattagtacctgttttatgatgttgcttgtacaacgcatattttatttcattatttatgtgcatatgtatctgtgtctgtggtggtggtgtgtgtgtgcatgtgtatctgtgttcatagtagtgatgttatagattcatttacgtgtgtaggtgtacatgctcaatgtgtatatgcatgtgtgcatgtgtgtaataggtatacctacgtatgcaggtgtacatgctcaatgtgtatgtgtatatctatttgtgtgttgtaggtacacttatgtgtgctggtctatatgctcagttgtatatgtatatctatgtgtgtgttataggtacacctatgtgtgcagacacacatgctaagaggactaggaggcagtttgctcaagcactccttaccttatttctcttgggatggtgtctttcactgaacccatagcttgttgtatttctagctaggctggccggcccagtgatcttcctgtctctatccaccaatactactgggtttttaggccctcacggccatgccagctttattacatggatactgtaaagctaaactcagattctcatgcttgcattgcaagtcctctgaatgactgggccttctttcctcaagacattattttttgaataatagtaatgagcctaccatcttgtccttcattttaaacactggtaatgtttacatcctttttttagacctagttaagtatgatggactatcatcttccagtttcttgacaaataagagttaaactccaaggtatcctctacactttttttttcaatcttaagccaatcattcctgtgtccagggtgcctgcctatacatctcattttttctattgtataccccagcccctggtgctagtacctatgtgaaaattaattaagtcatgtatttaattattctctcacacatctaaataattataagtcatgcattctcccagaagctacaaaaggcatagaaaccatagaagatgggaattggggaggaaacatattggcaagggatgttaaatttaatatggaaattgaaatgatgaagaaatactgaaactgacaatgaggatcaggtaagaaagtggaaaaatagtgtaacactgagacatgagagggaggagtctgagaaatgctagctaaaaacattaaagaacacttatggcggaaaaaaagtgccaaatagattcaggaataagagaggaagagagagggctgcaggcagcagaggctgaaggcatccaaatactggtgcagctctgttttcctcactgcatggatagggaaactgaggtacagaaagcttaagtatgtgaagggctcaggactaacaagaaacgcccaggtgtggtagtgtatacctgtaattctggaaatgggaggcagagacagcaaagatgaggagttcaaggttacacttgagcccaaagtcatcctgtactacatgagaccccatttctcttcattctttcccattccacaaaaaggataagtcagaaaaacagccagaacctgaggccgtatgtctggggctgaattccatacattgtttattgagcatgaactatcttcagacttagaattataagatatttgtctgtgaggatcccaatgtaaagtgtagctagatatctgtgtaatctattaaggctcagcattgacccagacacccactatgaccgactcgagaacgtgaatgtgtctgctggtgctcatgtatgccagggtatcagggagagctaacaggatcctatagagagaagacatatgcccttggatggcctcattaaattccaagttctaaccaatgcaatcacctttgccacagactctgaaactgaagtgtgacagctccagcaggcaagagcagaccacctgggaacgtttaagagtgccagatccaaaggtaggccactgagggccatggcctctgacaaaatgaagcatggagagagctgtgtgcaccacagaaagtatgtcgtgtagaagactgggtcacggagatggagagaagcaaggggagggaagggcacaaatgcatgaaccaggagtgagatgatggggcgggaagtaggttacagaggaaggagaggaaggagaacatagagaaggaattgtgggagactcagaaaatgtccatacctaacaggctgagagcttggtctagcgcaccaaagcgcacctaggacagtctgtagaaagggctgttgacaccttctctgtacagtggaagttaaagtgacccccaactcaactcattgacctgggtagcaccccaatttctctcttcccccctccctgaaggagccccagaaacccagttgcttcagtggagctactgttggttcaggcttcctagtgggctctggattttttttcccctacttggccaagcatgactgacctatctctgtgaggcaacccagcaagcagagtgtgtggctttggtcgggctactgtcagccctcaagaaaatacctaccattttaaacacatggctccctaatgagcccatgaggtatctgagatctccctatcacttatccttcaatgagtcaggccagaagtatccatggaatgggtcacactgctgcatttatttatttagatcctggcaaggaatcaatcaatagacagcctgagcttagtgtaagacaaagacccataaggtgaaactgctagggcaatgtggagaccaggtctgaactgaattgtacagagctttatgggaagccctattggtgggctagggaaggaagatgggggctgaggaaggggcagccaagagaccaaagaaaggcactggataaaaagggcagtctgagttgtcaaaaatgaaaggaggtaaaatctaatttgaaaagcagtaggcatccactccattgactctcctccggggctaaccatccagacatctgggcgatagagttgatagcttgggtatttgagaacatataagtgagttcctgctaaaacctttgtgctatttcctggaagtcaaggaactagctgcagatactggcaactcctggagtctctaagcccctgctgtagtgtccaggtaggtctcctgggttaaggagagtgtaagaggggcaggaaagaaggggccttttcaatgcagcacccagagagctgcactgtgtccttaaaccctttctgcctcaccagcttgttctcgccaggctgatctggtctcccctgaggaagagctggggtcacactagcacctgctgactgtcaccctttgactagtgaaacttcctattgctccctgaaaccacagggaactccaaagagagaattttgtggctgtcactgggtaaagctatagctatcaatgtaatctcagaggcgagcagtgagcaggggctgggaccagaagagtgttcctgtctctcagcaccctctgacaggaaaggcaagcaagctgagaaacaggatgctgaccaccccttggtccctgctgcagagaagcctgttgtgggtcctgctgctcagcctgggccccatccacagctctgcatgatggcgacaggacctgctgctgtcactgctgttgagcatctgttgatggcctcaatggtcagttcccttgtgcctttcttgactggtcctgagaatctctgccctcatacttcctgacggaaggcctcaaccctgggctctgaattgcagatttggtctttttttgctctgagtacctggtctgcatctggaccctctgacatctccattcagaggggcacaagggggtaggctctggcagagactccaggcaagcagccagcctcgggccaggggaaagagaattattcatagaatcgcagatgtttttgatgaaaagaacacacaaaaacgcatctcacttatctatcccaccttgcaatgtaggctcctgtccaaaatcacatggcctgtccccatctgcaaaggatctcttatcatgaacaaatacatactaagtgagccttgtgtcttctcccttgtccctgtcaggtggaggagacgggcctcttttctttgaaagaggctcacacactatgtgagaaatttgccttttacactcattgcctgagcatacacagagagctagcccaccccttgacatggattttttttcatacctgaataccacttttacccataaacagaccagaacatcaaagaaataaacaagcagggtgtgtgatgaaaaccaagcaaagaggcaggcgctggtgggagagcaagggcgtagtacctcagggtagcacctctagcaactggtaaggaagtctggaacaatatgacgaaagttgtggataattctctaggacgagtcaacagtgggaaggaagcacggggccaatacgccaagacctaaagccatttcgagtaggtagaggtaaggtaaaggcactgcttgtctttttttatatcccatcttcaaagtgggagccgagaccttcaactgatgactatttggatccattttctcctgacacacaccatggtaggaaaagaaagaaactcaaatccagaaccaatccacaagtcatacctttgcggtttgcttggaagtgtcaaaacctgaaggtttctggaaagtctgaagtccactcttgtgggtaaagatcttggagagaatgagtgctcccatgctgaaacccccctggtctagtgctcccaagttggtccctgctggcccacgcccagcatggttagaaatgcccactctagatcctttcccttccagctaccttctgtgtcttgcctccacctcaaccctactcttccctttgaattgtttcttgttcttgacattaagattcaagtccagactggctgagtaagggtgggatcgtttttcccaagtgccacccgggcaccgtttgagcagttgggacatcttcttccagctaaatgctagctgttcccaaaaggccaaggccatgaggctgttcaacaggaggtgaatcatatcagcagatacaataagttttggccacttagtcaccgattccaatttctatcctgctaccatgagtgcgaaactacagaccgcttccctttcaaatcctgtctcttcatctgcaagtgaaggcaagtaatacttctatttcaagcctagattatcttttgaaggctaaaccaactaccgatacagtaccaagtacacacagggcatgcagaccctgccacatagacgttatctagctttttgaacaacaacaacaaagggaaaaaaagggaagaaaactgacctgttctgaaaattcagatctgacccactgcaaggtttaaaacacgtcatggagttgcaggccaagcaggccaagtcctcagcagcctgtccccgaaactgaaggccagatatggccattgccttccaatttccacagggcttgctcccttctgcacgctcctcccctcatcttttagctcctctccccatctttctctttcttcccctttgttaagaagccacacaaacaccttcacaggaccatagtcagaaagctcaacaaccaagacaacacctatcccagagttgtatcacccaaatggtattatcacacagtgtggtgtgttctactctgcagtagctctcagactttgccatatctcaggatcctttgggggaattttatgaaaacagcagttaatgcatctttaccccaaacctggaggacaaagccaaagattctctcttaagatcatagtaaaataaaatcttcttgctgaaatattcaagaatccctcactaaaatgactcctggcattctactacacagaatcgcttcctctttctgcagatgtggacaaatacagaaacccacagccagactatatgcaaagaacgagaggcttggggcagtcatccctaagagggatggatatatttctccttcatatccctctctcagactcagggagatctgatgaacaggggacagaaagagtgtaagagccagaggagacaggataccaaggaagcagtgccttcgaaaaccacacaatggatgcacacatgaactcacacagactgtggcatcattcttatggccaggaccagaatgggtctgccccaaatggggtcctagagccgagagaaaggacacatgcccctattcctaagcaaagagctatttccagcagaagacagccatttgcaaatgaaaaactagttttgcctcactcgggaaacaaatcacttctaaggctaggtcccatgccaacacaaaatgaagtgggcagaatccttgcagagtcctggtctcttaatgtgaagtcaggtgtttgttagtttgttgctgttttctaccttacagatcctttgcagatatattacagcttttggttttgtatttttatgggattcttgtgtgtgagaatgtgtgcatctctgcacctatatggattccttgtgctttttcttcagagctttttcttgttttgttgtattaggatttgtttgtttgttttatcaccttttattgtattattattattccctagctacctgcttgctttctaaggagagacagaaagggtgtgaatcaggatgggaagagcagtgaagaggaatcgggaggggtaagggagggaaaacagtaatcagaatagattagatgaaaaaaaatctatcttcaataaaagaaaaaaaaacttatatagaccaatagaagaggaagaagaagaagaagaagaagaagaagaagaagaagaagaagaagaagaagaggaggaggaggaggaggaggaggaggaggaggaggaggaggaggaggaggaggaggagaaggaggaggaaaaggggggaggggagggggaggggaaggggggaaggggaggggagaaagaagcagctctaccatgctctaaaaacaaactatataaactgtatgaaacttctttttccccttcttactgtatctttaagcccttcattttaactcccacaattcccttaactgattaaggtatgtcgttttagcttttgagagtttataatctttccttcagtaaaccccaggcatggtaaaagaataaaaaatatgtttgggtgtgcagacagcagatctatcaaagcagacgtggagggatacagatggaagacagcaaaaataggagtaggcaggcagagtaggagggaggggtgggtgacaacaacactcagtgacagtgattctgacttcccatgaaatctgttgtcctggcaacaggatactgaaaggttaaaggctgctgctccttacaactctacagagcatgttgccaagacaacagaatgcatccaagacacatggtggcagaccatgaggacttgggggtatgccaggaaccctctcctcacaaggcaggctacctgagatggccaagccattattgctccaattcccgtgattgatgtcattaacatttattaaacaaacaatcaaacaaacaaacaaacatattccccctggacttaccagtccctgcaggtaacttctgatgactgctactccattaagaaagaaagaaaatgacactgggctgtaactatgtagacataagtcaaggagctgccaaaggacacccttaacatggaaactacgggaactatttagagaatacaaagacaaagacaaaccacgtgtttctagctgtctacactcatttagtgttgtcacagttatgaacaaattttgtgaacaaagcaaaaactaagtaacccatagaaataccaaaacaagagcatgtctggcttgaagaaatcattctgttaggaataatcccaatcatttattcactaagaggtgtgcccggcaaagtaacaaataatgatatttacacttcagacagaagtattcaggactcaagagaacccaaagagggactgcttagtctgtggggcagtagaaggactctggggacatataggtactagccctatcgtacagatgaggaaacacaagcagctaagttacatgcagaagacattgcctagtctaggaaagccagagctcaaactcaccaggcttcaaccccttgaagtatgctaactccaactgagaggacaggacctcagcttaggccactcccttcctatgcctaggaagaatacaaaaatatccaactacgtgccagggttcttcagtcctataagatctggccccagacgacctcatcaatctaagtcacgctgacctgtgactcatcaaaaaccaacaaaagtaaaaataaaagaacatgcttccacttcaaagccttctcacctgctccaaatatcatcccttacatcttcacacataatgcaggtcctctgggaccttctgggagaagtctaactagaatagctcatgatattccttcattcacgctcattaacgtttaccactgctttagtcaggattctctcactgtgacaaaatactgcccccctaaacaaatttaagggaggaagattatattctggttcctggcctcagaagttgtggctaacataggcgggcatggctacaatatgcctgctgtcagcaaatcgtcatggaggagggagtatgtgagaggggaaatgtcacctcatgtccaccaagaaacaggggagatagacaggaaacatagggaaacagacaggaaacacagggaggcagacaggaaacacagggaggcagacaggaaacacagggagaaagacaggaaacacagggagaaagacaggaaacacagggaggaagacaggaaacacaggcacacaggcaaggaacacaggaacacagtcaggaaccataaggagacagacagaaaacacaaaggacaaagggtatcttttcgatgcatgatgcaaatagcccacttcctccattcagatcccagcttccagagtttccatcccttcccaatagtcaatccaattatgaatatatcaaaggattaatcactgattacctcaaaatcctcaggacctagtcacccacaaaacaccctttcatctggccaccaagcccttagtaaatgagcctttccaagggacagtcatatgcaaatcacaataactcccattttaaaaatactgcttaaataaattatctgtttattgtcaatccactccatacaataagtctttcttctagactctaactctagaaccttcggtggcagagactttgcttggatgaataaatgaagagaaagaatgattttgctaagtgaaattcctaaatcttggaaattccttgaagttcctaaataccttaggaaatggtactgtctgcatttaatgacatcacctgattgctagatgatttagcacgtcataggaactgcctatgttcatctttcaagattaaaaaaaaatgtctgttttctcttttaaatttgtgctaataaagtcaagactgtactccagtgctttgttacataaagatttactctgctgcttcacacggaacccctaatccaagacaccccacttgaccacgtgtgttagaaataaactggaaatgcataatctaactctaagtctgatgccacatggaaggctggtacctggccagatgtgaagaagggagggtaatagagatagcatcccagagagagataagaaatggcttcgccagtaactagagacattaatcctattatccattttcatttggatttaaaacactttgctcttaattgcaactcaaattgctgccctaaaataacgaattcatacatacatctactaaataggtattaagggcttacaatatgctaaatgtaagctaggttctgggaataccaggaggaaaaagatgctatccctgccctggcaaagcttgtaggcttctaacagggtgaacagagaacaaatagggactgcaacccgctatggtcatagtagtgatgatagaaagcaggccatggaagggaagaaaggagaaagaagttttgacttttcatcatagagaagatgtgatgtcaattctgactgggttgagaatcacataggaaattagatcatgtccctgcacctgtaagggcattttcagagataaaccataaagaccctgagctaaaaagtgggctaatacacccatgcattcaagctttaagcacaggaagttgtagacctgtgggggtgaggcttggttatagaaagtagctccctgaggctatgtcctttctggtgtgttttgaccctgggcacttcctgttatgactcctttccatgtcctatttgccaggtgagccaagccaccacaccctcacctccatggcgaactgacacctgtgaaactgaactgagacaaagccctgcctcccctcaggttgacaatgtcaggtactttggtcatggcagtgaggacagataacttgcagaaaagaaaagccccttgaggcaggagaacgtgggtgaaagcaggtgaaccagaggcccaggaagtgagaacaccacactcagagaaaacacccaaagtgcgaacccaatcaccccagagctgggtgagttctaaccgtacagctagactaatggcttatgcctctggttatcttattaacctatttcccaggtattttctcattactgtgtatatgtacatgtttgtctaggcgtgtgcacatgtatgcatatgtagttaacagtgtcttcatcattctttacatttgtttttggaggtagtgtctcagaagaagctgattggtccagccaggctgtctggccaatgagctttggggatttgctcatttcctcctccccagggctagggtgatagagctacacctccatgtttacagggtgtgctaggaatcagaatccagaggctaacacttggaagaaaaatatttgaccggccgaaccatctccccttactctcctgtactttgagcgtcctgattcaatgcaaggaggattagagtctccttgaatctttattttatgaattaggaaactaaagctcagaaaaatgtaaatgataaaattaataataataataataataataataattctcaatgccacacgtaaacaggagtaatgacaggtaatagcctaggcagtggcaatctggtgtgtctcctcttagctgtggcatgcatgttagtttgcaagggacactgcagcaaattatcacatacttagtgcctttaaaaagtagaaatgaatgatctatggagttcctggagagcaaaatcctgaaactgagatgttatgcaggtaatcctttggaagaactggggaggttccttccttacatcttcaagattcaagtggctttcttggcttgtggttcagtaactccagcctgactttttacacaggcatctctgtgtctatgtctttcttctcttctgtctcttagaagagtatctgtcacgtagcttagggtctatccaaataatccaagataaggccaccatgagatcctttatgacatttgcaaagacccgttttaaaactaggtcatggtgacagccaatttctattgtcagtttgagtcacctaagagaccggtgagacaggcctagtgtgaggatgtttttagtgtgtgtgaggatgtctgaagagagagttaactgagaagaccagccctcagtgtcggtgtcaccatggtgggaaaggaaagagcaattctaccaccagaaacccatcactggctttgtggcccaccacgatgtgaaccgctgtgctctccatgcctttctcaacgtgatggacgtccatctttaaaagtgtgagccaaattgagtctttctctgctcaagttgttttcaccagatacattgtcataatgacgagaatgcagacacatgtataggttctttaggacattggcatatcttttggggggggggtcacgactcagcccagttagtgttcatacagagtatacagttcagtgactgtcaacttttaaaggtcctcattttaaggctctatgtgtcacactgtgccaaaggctgggaataaactattactgattcccacagcaagccactgtatggcatagggaaatgacaggtaaacaaattatgaagaaacataaataaggcactgatcaacaaatgggagagaaattgcaaattccaaggtgggaaccacaggaggatctgctgaaggaagagaatggctctggggggacaaagacaaggatgttctaaggaatggaggaagcacagacaaaggcacagagatgtaaaccagccaagaccattcagggagctgtaaatttagcaaggcttgacattgctcttcaagggcggggagactaagaaaagtcctggtgaggcagtctgggccctgatcaaagagcacgtcatactccaagccatgggaagccagagcagagctctcggtgaaaccatccccatcagacttgagtctctaaagaatctcagatgaaattacccatgtagtacatgcaagagaaagccagagcttgatctctagtcaaggaggatgcaggcatggggtagggacccagtggagataccctaagaagatggggctaacagaactcctcagagaacttgattattgctggaggaagagagtagcctgggctggctccccaactggtaactatcatcctctgagagtgtgtctcttgggtttccttcttggccaccccgcccccactctgctcttgtttttcttctcctcttaatgttatcgaaggacttctgtttgacctttgttatgctttgcacctgtcctggccaccccacaaattatgctgcaatcaagcttctgctcttgaccccctacatccaaggctctgaccttgactgcccagtgtgcagttttatgcttgggctcagaatccagggctctgtctctgcacctgctattctagcttgaaacctcaaaacctaggctttactcttgactcctgaacccgacccactcactgcgctcaacactttaccccaaccccttcatcccttctccccactgttcactctgagccttagcctgctcatgtcctcaaccaccttcttcctacaactgaggaaactaactaactggtatagtaatctagacgcccaacccatgggactctatacttgtagacccaaaggctgactacacatttcgacttctatgaccacagttcctcactcccattgccactgtcaccaacctgtgatgtatctgattacacttgtcatcatacttcctgtaactagcatcaaaaacatcaacagtgcacagtacctcagaaggtcaagaacaacttgaaaatctattgactttgccagtttggtgaaggtgagagatgaggaaatccacggtttgagcccacattttcagatcagaatataagggaagaatgaagagcaagggagttttcatgtttactcagatttattaatgcggatatgatgtgcgtatgattgtgagtcacaaaggtatttttccatagatatacaactaatattttgagtgaaactctcctgacgatggatgctattacacactatgggatgtttcctatgctttgtgaccccatttcaagtgcctgcaatgcaaggaaagcatgcatacgcacagcagacattgtgacatctgatcaagtcctgatctactttcaaacatctcctaagaatccctaagagtaaagatgaaaagaagaaagaataataacaaggagatcagaggaaacacctggcgaatgaggacccaggcccagagcatggtagtatcttaagttgtgactcaggtctccatcagcaaaaggtttctagatatctgagaaccaaaaattaagtcaaaaccaaacgtttagcaaatcaaggtgcttccatctctgctcatttgtgttgaattgcgagacttcacatacatagccttagttctgaaaacatcttttccagtgtatgggccttcatgagccactaagagattccatctgaaacaggtcagatgtgagactatagtgtgttataaatcacagggtttacactgcccacataaagttctcaggttttctcgaaatataatgacttagttgtgggaaacaaaacataatgttttctgtccattattcttcaatgtgcaaatatccaatctatatcctaggattgtatcatataaaaaaagtttgatgtttaaattaccatttgagttactgaattaagtcttatttaaaaaatattaaattgagtttgcatttgggattagggcacaatttccagcatttctgaaatggccttcaccatacttctgtcactgattactatgtatttatgtgaagggatagttgttattaatgttgaaaattgtgaatgcaaagtatcagtcaaatctgaaatacaccgaagatgttctcattccttgtagtaccaaatactcagccaagatttaattctttatgtaaagcaggatgaacacagttgcctctttaatattcaaatttgctttcatctggaaaattatactcataccgaagaattgtcttaaaataaatttctttatgatttactattattactgttagattttatatttatctactacacctttatactcagggtcacataaaagtttcttgagcaaaacggggtcacaagcagaaggaggtcaggactctgcactccagaggacatgaagaagccagagcaaggacactgaagcagcatttgaggtgaggcccagggaaggagagatgtttgggcttttgtatcatatggatattaactgaattgctaattgtcattttctttgagaggcaccttcagagccacccatacctccaatgtccctttgtcattcttccacggaggccagatacctccaagggctggccacgcgacagacatcactttggacggtgaagtcaggatgtgaggaagatgtttcctgatgtaacactctcctaacgttttccccttccttgaataaggacatgatgtctatgatagtgaggatagccacatctcaaccgtgacaaaaataccaaaggccaccacacagcagggctggcatcattcagtggctgacccacctccagaggaatatttctgagaccccatctgtctaagccattatgtgcaaatcaccacctagaggtcctggacagcattgctaagcctctttgacctatagcttcctcatctgtaagacagagacaaactgtctcataaattaaatgaaaacataggataagatgttatgtgtgaggtgacaagctgcaatcaggtgactgggccagagctttacacaaagcaaacgattatcagtgtcagtctttctcatcacaacagcataaagacttaggataattaagccaccaggtctcagatgatggaaataaatgccccaagggcttctccatcagttaataaaaatgtcattttcctttccgattcaggaatggtgtgcagtatgaaaatacattacggcacatacgaaaggtctgagttttaccatgcttcacatctgtcacctcctgaggctcactctgaaccaggagcttttgtctaccttggagaactcgacactcagcaaggtcaaagggcaggaccgagggtacaaggctggaaatgaggacaaccgaaacttaccacaccaacccacactccacagccaacaccctccccttgccgtgcctctgcacccgtgtagactccatcatgtacctgaggggtggttggggagtgatgttcgagtgtggtagcttcatgaccatcttcatttctgtgaaaagcatgcttaaggcttcaagttttacaagcaaaataatggccctggacaagtgggcagtattctgaagtcttttcaaagagatggtgtacaggccaattaaaaatgtacatcatagaagatagaaaaaaatctagaatctgcataaagttgagtgctgcctatatacctgcagtttccagtaccttagagagagctgcttgcccagctttccacaaatcagggacaagagaaagctggagagatgttaaactccagacaggcagtgctatcctggcttcttccttcctcgggcatgaactgggagaaaggaaccatgacttcagagtccagtccaacaactctagctcctggactttgacaaaggtacacaaacactcacgtttagtttcttcattaagacaaaggaaatgttagggcttagctcctaggattgcatgaaaaactagccggccagtggtggtgcatgcctgtaatcccagcacttgggaggcagagggaggcggatttctgagttcaaggccagcctggtctacagagtgagttccaggacagccagggctacacagagaaaccctgtctcgaaaaaccaaaaaacctgaaagccaaaaaaaaaaaaaaaagaaaaagaaagaaagaaagaaagaaagaaagaaagaaagaaagaaagaaagaaagaaagaaagaaagaaaggaagaaagaaaagaaaaactaaaacactcactaacgagaaccaggcctacgctatacccgtgcatgataccagtttgctcctagaatgccttcttctagacaagcaaaagtgggtgaaaaaccacagcacttcaaaaacttcagagaagacactggcaaaggtacatgtaacatgtagttaccccggcttaaatgtgatgctagctaaagaaacccacatgagaaaatagagaaaaagaaagaaaaagaaagaaggaaggaaggagggaaggagggaaggagggagggagggagagagagagaaagagagagaaagagagagagagaaagaaagaaagaaagaaagaaagaaagaaagaaggaaggaaggaaggaaggaaggaaggaaggaaggaaggaaggaaggaaggaaggaaggaaggaaggaaggaaggaaggaaggaaggaaggaaatcactcaggatgcagaggcaggtggatttctgggttcgaggccagcctggcctacaaagtgagttccaggacagaaaaaccctgtctcaaaaaaacaaacaaacaaaaaacaaaacaaacaaacaaacaaagaaaggcaataatcacaggttaaagaggataatgaactctgtggggggtgtgcagagagagatacagaaagagggagacagagagagaaaagaggggggaagagaaatagggaggaagagagtggaaacaggggccaccatcctatctgtcacttcccaaagtggctttctgcacaaaaatcaaaataacaacaaaaattaaaaatcagaaaacagtaaaacctgaaaataatctatggagcatcactgcccaaccacatcctttagaaaggcgagagcgaaccacagagcacacaatgagcatgcgcacagccttcagcgaggagaaaggcagtctttcactctgatcaacccatacaccccgaaccatgacttgcactcagcgtgccctttcctctctgcagagatctgatctcactccatcttcctggatcctgctgcaatctccaaccttctgctttgtgtcctacatcctgtccaagccattctcattgtcaccaacgccagaagcagaacgattttcgggactctggtgttctttattgagtgtgtgtttgctgggtaccattccaacatttttaccatattttcttcaaaacgatgtaaattggttagaaggaagccaatttatatcttacaaaccgtctactgagcctcatatcacttaagcgatgattgcctacatttcccaagctcatcggaatggagattgaaatgtgtgacttataattcttaattccgtgtcttatgaagcaaaattgtacacagaaaagcatgggtttccaaacatgtgtttctaggagttgaatcccagtttgctgctaactgggagctatgatgttctggactggttacttaacatctctaagctaaaaatgcaagaacccaatcaatggagaaagctcctggaaagagaagtgcttctagcctgatttcagatcggcatcctacacctaggatctcagtaagagtaaagcaattataacaacacaaaataaaatacgttattcattctcattctcaggtgggggactgccaagaagcacctcagacatgtttaaacattccttgttactgctcccaacagtcttctgctaaaagttcttcagtagctagacggagctttttctgtcgtgggtgtaccctttttggccatggcaggcttccatactctaatgaatctcaacttcctggatgggataagaggtctcttcagcgctcttcttcagagctctctccgagatttctctcctgagtttcctttgtcagtgttatccaggctcttagcacaaggtgcatgttacatatcgcatttaatccttagccgttcacccatggttgccttcctcccactgtgcagccagggaactgaggtcagccataacaagctggtaagtaaaccggaattccacatccagaaggttctggttgaagtcgctcagactccagcttctgagttctcagcatctgtcctacattgtgtcctgtgcttctccccatcagagtaccatgtgcatttgcctccctgagagcagaacactggctctttgactgacccgtctgtgtatacaaacatgactgcacaccatttgaccagacactgcggcagatctgtgcatctttgtcatcagaagtccactgttatacagtggtgtctttcaggcaccaaaggctccgcaaatacggagagagagcattaagttctagccaatggaaagaaaacaatagacaggaggtgcaaatgaaacaggttcccttagttactaagtttcagccacagacactactgtagcccagagttcccccatcaattccattttgaaatatgttatcctgttgcccaactattgctcacagctgtcaaatcacaggtcctctttctacctagacaatgtgcaaccatggcaactgagtggatgctttgatttaaagccaaagacacctgacctcagactttgaagccaaagcgtctcttgccatgacctggagggctcttggcttgatttcacgaagatcctctaagcctgtgcatattcctcagcacagcctgagagtcacttctgtcctctcaagtgcctctggccctgtgacactgctcccgtggccaccatcaattttaccccataccctccatgaccaagcatcttactctctgtctacctgggtcttcttcctccttcctctttctgactttgaactaaaattcagttagacattatttactctatgttgggacttcttccaaaatagtcactgttcatctccttttactgatgggggggggggtggtaaaggtgagatgaggtttttgaatgaggcaacaatggggacgggatgaagagtggttgctcgggtgcatctcatgatatgagactcctgagatccacacaaccagatcagttctgcctgttactcctaggaggcaggagcaagcaggttctctgtagaactgtgctgccctggttcattcttgattctcttctgcaatgagctttcttcattgctagacattgaatcgagtgctagatgactgtgacatcccccaaaatgccataggacaaagaagaaaggagcaattaaaaatgtttatgaagcccccagcagcctcattctttccttagggacagcaggttatagagttagagtgtggcttcctgttcctacagtatcagcttagatgtgctctttgatctctttgaaccttggtttcacatctaaaagagatgcattgccgcttagctcagtggtattaaataaaacgatgcatggtcaggctaactgcctagcatacagtgagcacgctcacagcacccagcatgcaccagggagcacgaaagcccagcctccacccgggttgcacctcagctcacagttttatattcatgttgagagtctgcaagaggtaccagggggatgcaaccaatcagcgtatgcacaagctccccgctcgagggaaataacacaggtttgcaataactcaagtgagcaacagcaacaaaattatttttatctgttgtactctgggaagaagcacacacttatttatgatttcaaaatttggctcttaatcatgtcaccattcttccaatgcaatatcacatccttagaataccgtgcatgaaataaaacgtaatttacccaggaccacaatctttaaaaatgttgcctacccatagcaaacactcaatgggttttgccacagtgggttccctctcctttgcatttgtctgtcccacttcctggcatcagtgactcctgccagcatctgtctttaactttcattctggtgtccacagggacataagaacatcctctcgcctgatagtgaagcaactctccctgccgctctcactccagcctgccctagactgaactatgggaggaagcagcaacagtcatctctcctggcaccaacagatggcgacactggtcataaggggttactctccactaaatttgtgctgatggttctcatctggtcaagcaacacacttgtttgtggtggcttggcaaggctctgggtatttccaaacatctttgaccacagagcatgccctttagacagaaacataaaggcagttctgaaattggtgacaacaagcatagatggtggtactaaggtggagatgattctaaaaatggctaatgatgctcgtattgcatgggggtgactcactctaaaacagaaatggctgaaaaggacaggcgtacgggctgtgggagcttagcaaggacaccaaccagtgaggaaacacgactgaataactagccgtggtgtaaaaatccaagtgggacatttttctgtgatttcagattcagtggtgatgtcaagagagattctgtctgtcattagtcactgaatctaacgtgaatttgctaatttcctttcagaagcttcgaatcgatgctctcggctttaactgcactctggaatcactcaaggtggttttcagattccccagaatctcaggctgtgatggaaccagatatcacgccattcggagtcactgccagtcaccccagcttaaaatcttccaagctaatcatgggggaaacatggttgagtttgtggggcgaacatccctctgaatgtgcaaaccctgagatgttagtagatacctttctagtcctgtaaacatttgagtctccctggacagtaactgcctgccctggggcatttttctttgtggaggagaacgcagctatgatggtagaacagcgggtactttatagtgttgaaggatctactcacatacctgtttggaaaaaggccatctaccaagactccaagttcaataccgcttagtcagacacacaaacctgtcttaaactttagatcattggttctcaaacttcctaatgctgagaccatttgataaagtttctcgtgttgtggtgaccccccccccaaccataacattattttccttactacttcacaacaacaatttttcagctgtaataaatcataaggtaaatatctgtgttctccaatgagacccctgtgaaagggtcattcaatgcctgaatgggtcacgacccacaggttgagcggcattgctgtagacctttctacaccactatcacattttcactttcatctcctaactatctgactagttcccatccattcgctcactcatcgatgtgctctggtgcacgtctatctttaactacttagttttgccttaaaaaccaatgcatcatttgctttttggaatagcctcctttttaccttatctgccattatcatagatgagcccccatggatgcccaggatgggggtgagagtctgagcagaaatgaaatcgaggatctgggcgatggcttcctggtccgtgtcatccgcgaacaccaccccctggatcttccggtcagacataagatcgcagatgcgggtgattatgctctttgggtcagtctcgttcatggctaccagctccacccggggaactactgagagatgatggaagtcatctttctcgtgggcatcttttatggccacttcgtcggaagtgcccacgaggatgacagcgatgccgatgctgggggcgctcttttgggaacgagctttgctgcccgatacggccaagacggccaacaccaaccagaacttgggagaacagcactctgcgctgggcttcatcttcagctcgtcgactctctgaaaaagagaaggaagaaatttatttaaaacgtgacccgcgttgtggaacgcatccttgaagtgtctgaatgctagaaaatcaagaacctcgtctccgtctgcggttcatgaaactcggtttctctccgctaacccagtctcttaattctgacgttcatggggcatgatgagagagaaaaagaaaatttcaagagcccaataaatctttgaccaagacaaatgtgcagccaacagacagagataaagcaggcgaggatatgctggaaagtgtgagccagccaaacacacacactggaaacaccaggagggggcttgctgtcctgacccctggcactctagttataaccctccttgagctgcccttggcaaagattaggccaagtgagctgcaaaagggggctcagtagaggctggccacaaaacacggcctggataagatgaatccagtaagctctaggcacgaaggcgggtgttcttgttgtctgggcctcccagagagtgatgaccaagaaactacttcagtgtttctcctttagaatctgtcttttaacactaaatcagagaatcaatacaagggcacttaattttaattgatctttacaatcacctagcaggaaaaaaaatgaaagggaatattagcatctcattttatgtgtgttgacacaaaggttcaatgaagttaagagacccacccaagacttaacaagttaagtgaagcagacttaaaaaacagattccagtgtgtgtgtgtgtgtgtctgtgtgtctttgtgtctttttgaatatatactacatttgtgcaggtattctcagagtccaaaagaggcatctaatcatctaatctcatggaacccgagttacaagtgatggtaagctgacagtttgggtgctggaaaccaaataagtgctggtaaatgctgagccatctctttagacccaagacattaatcttgaacctagtcttgaatctgatttccattctaatgtgtgtttcacagcaccatacaccctaccctgactcgccgatgcctgtactatgagaggcagcattatcccggccttctcatgcatcagagtacaggagcaagcaaatactatcatagttggagtcatggagtgtcacccttgaagatagttcttttttatttccaacaaaatcctgtagccataacttcctgaaatgatggtttatatttgtgtataacgcactaccttcttcttactaaaaagtagcctttttttttttaatctctacacaggcccccaaagcacacgccatgcaacagattaatgatgcagaattctgtagcacgtgagctgtagccatttctcttaggtttctcatcactcaccctaagtacctctcatcttataagaatgggccctccctatgttgctttgctttaaatcaccatttatcgtacaatattatacactgtgcactagcaagtattttcctcacgtgcaatctctttgcttcccatgaaaattctacaaattagaccttttattccccatttctcaaatggagaaactgaatctcaaaacagttatgtaatcctgtgaggtcaatggtgttataatgccagaatgcaaatagatttaacatagcattattctccaagaaaacagcctacaaatagcacccagacttagaagagactcctacttttcaatcaaacatgaaaacgcaatttaatctctcctgcttccttgaccaaaaaaaaaaagagggactttacaaaggaattattaggaacctaaaaatttgagaatttggctaacaagaagaaaaaaatcataatgaaggtattgaacaaagaaagatcaggaagcattcaagctgagcagactgaccacaaagggcattagcgattcgggagtgagaggctaggacattttgtggctgaggaagcacaaaatccaatccagttcttggcagaaaaccttttggaactcttgctgttgcagtcatccttcagccctgccaagaggagacctgtatcgattgcctcacttctccggaaagaaatgatatgagtgtctccatggttcacacccggcaaagctcacacctgacagctttctggtctctctgtttccatagaaatgagaaatgactccgaagcttccaaactttcaggctgctgagctatgcatggtcggccagggcaactggggactgagcatcttccagcgtttaaagaacgtcagtaggatacagaggctcaagcaggaccaggtagtcagtgggagacagttggatttagtatctcaaggagatggggactatatgtatatataaaaagcctgcttgattcccagggctgattttcaacgagaacccagagattcagaatttggcaaaatctatccactcgcttcattccactgggattctatgcctacagttacaagtccctaaatcagatttcttcacatgtaaaggtggcccgctctgccatggcagtttattaactttaatgcacccaatgctctcctgtttcaagctcttatttgctctctttaaacacttcttgtgttcctccatgttccctcacacaatgtattacactttttcatgcaatggccagtggtgacagtcagcaaatagaatctggttttcaccaagcatctctcttataccgggatatagcaaagctctttacaaagtaatacattatgggagatagcggtgacagagggaccatgagcagacacaaagctttgaatacaaactcagtttcagagtgtgtgcggggtggggagggggcagttgagagaaagtgcgtggtccgagataaatgctgccgttcctttcttcagacacactgagaccagactggatgcactggctgtttgctgtttgcctcctcctctccatgttacatcatcctctccagaactgaaaagtgctgccttggcctctcaccaaagcccctgaggtctacctaatgcctgtgactggttttgtgcactttcacaacggtgcatctgcccatcttgcccaacaggagacctcccaagcaggccatttacatgagcaaccacgtaccaagcatctactaccttgcagacagagtttccccttcatttccttttatcctccagtggtgggaatcgaacctaagaccttgcacatgttaagcaagtgatctataactgtgctatttcccaaccctggacattagttttgattattagccttgatcactagttttgacgctgaagatgtcatggtctctctacctttcagaatcatcatctaagagaagatatagacacaaaagaaatactttgtctcatttctatttacattctgaggatacagcactgcctcatatacaatgaacaggaactattcaacaaactgtagccaattttaccactacattagagcattatgtaagactgtgatatataacattttgtatatcaaatagttcacgtactgagtctcagatgctatgattgatggaaacttttcatgcattatctgatccctatggaaacactggaagtcataattccccctgagttaaaagtgagaaaagagttttgggaggttaattacatggaccaagatcatgtagcaagttgggcttcatatccaagtttgtctgattctaaaagctttctctttccattctttgatagtacgggtagctagaagttagaatgaacaaatggatgaatgaatgaaattacgaacctggctttagagccgtcttgtgttaatgaagaacattaggatgcggtagtcacctaattactgttgtctggtttgtcactggtaaaatcaggataagaggcctaacctacatacctgagagggtttgtgaagatcaaaatgagaatatgtgtatggaagagctttgaagaatatgaaatactccacagatgcaaaggatattacttttgagctttcagaagctgttcaaggaacccagctatttttgacagcacaaagtgagcgtgtaggaggtagtgggggggaatgttagacagaggctgaggggaatattaagaggaaccaaacacgggcaaaggacattagttctcttctgatctaactttctggaaaagatgtcacatataatgtcctcagagtaacatctgcctcactgacagaatcctagtcatgtaactgaagtagctgaactcaggagccatccaggctaggagccagtagtgaatgaccatcaggaagcttgatggcctcattcatactttcatggttgtgaggaaagggggattcgagagaatccgcaggaaggaagagactggccatcaccttttcaaccgtgtgcttccttggcatttgggctgagtgatccacacataaggcttcattctttatggtgattatgacaagaaacagcctatacttgctcccaattgactctacatccacctggtgtacgagatggaccaactctttccttaaagaaagtagagttccagaatagcgccaacaggaagtgtgactgtgtaggaaaacttaagccaaaattgccaagcactgctccatcaggatgcgacctggagttactccattaagagtgtccatcatagggatatgacagacagtggtcatccacagattaaaagtttaggaactagacagatgtccttgcacatgcttgtaatcccagcacttgggagattgggtcagggagactgcaggcttgaccaatctgggctacacagggcaactgtgtctaataaaacagtaccagaggcaggcttcagacccaggaatgaaccaagccatgagtgaagccggaaagctatggagcacaggcatgaatacttgccacgtgaagtggtaggaaaagaaaggcggtctccacggggaaagacatgaccttcctgaaggtcagagtgagcatctcaacattacgatgccaagacaaaatccaacagcgggaatgtcaacaagtaaggataaatgccacactggcaccagtgtgacacaaccagcagtcccaagtacatataaatctaagaatacagtgtcacactggcaccagtgtgacacaaccagcagtcccgagtacatataaatctaagaatacagtgtcacactggcaccagtgtgacacaaccagcagtcccgagtacatataaatctaagaatacaatgtcacactggcaccagtgtgacacaaccagcagtcccgagtacatataaatctaagaatacaatgtcacactggcaccagtgtgacacaaccagcagtcccgagtacatataaatctaagaatacaatgtcacactggcaccagtgtgacacaaccagcagtcccaagtacatataaatctaagaatacagtgtcacactggcaccagtatgatacaaccagcagtcccgagtacatataaatctaagaatacaaggttgatgtgcagaaaagtgcagttaatattcctaagaggaaaaaaaagcataaattcaacagacaaaacatcttataagtaatatatgaaagacctttatcagaagtatgagcaaaaagcttggattacttcagatatctataaatgctcataagagaatacacattagacataaatctataatgtggcaaattctatagagtcaaaatgaaagaagtatcactttttttaaaaaatgtgtttcaatgagaaaaaaattacgtcttgctttgatttatttgaagatagggtctctctacatagccctagccatcctatttagaccactgtgtagaccaggctggcctcaaactcacagatatctacccatacctgactttaaaataactaatttttttcaatcacatatattaaacttttgaagagatttacttttaaagaaaaaataaaggaagcccaaagtacaaatcattttgcaggataacgatgaaaacacaaattccagagcatttagggaaaaatgtatactttaaatacatttctaagaaaataaaatgttactgagggcaaccaatgtttataatatttataactaatatttcactcaaccctgagaagaagaagaatggttgtaagagccagaggtggtggaaacttctaggaaacagcatgttcaagatacaacaggacagatgtacatatgaatacacatattcctcacacacaagatcagagcagacagaatcccagcagtgagcagaagcaggcacgacagcccactccttgccaagaagatacacatggttaaagctgctggaaggcggaaggtggttatctgcaatggagtgagtgacacaaggtgcatgagacaggccccagggcaggccgcgtgctcagaagtaggcaggccacactaatcaggctccatatgtttagttgtttgcttgtttcttaaaagaaaaaattgaaataaatttggattattgacaaattaaaaagaaataaatttggatagataggaaggtgaaagagaatctcagagcagctgtcagagagcaaagaatatcatcaaaatataatctatgaatttcttaaaaagtaaatagaatgaatacttttttctcattgatttttgggggagtctcatcttgcttataaattatgattcctgatagtgtgtgcgtttcttgtgctttttaaatttttaaaaaattctgatttgtttgtttgtttgtttgtttctttaatttgcctgttttgatttctaaagagagagagaagaaaaaaacatggagtcagattggtgggtggggagggttgggggagataggggagggaaaaccatgattggaatatagtgtgtaaattgtcaataaaaattaaataaagccaatgacaatgaaaatggacaaatgatatcagtgagatgcatgcagtacagaggacagacatagccagcccccaagggatcctttaaatggcaattaaatgacaaagctgtaaaatgagtaatgacagaaaataatggaaaatgtgaaggaaacatatcataaaacataattatgacacctcaagcagagattataaaataatgaaagaaaatactctaaaaattattcttaaatttgatgcataatatttaacaacactaataataacatcaaataagaaaagaagtacaaaagaatgttgaatttttaaaataaagcaacaaagaaccctcgttcagaaccaaaaatcatacctggctttatcctgtcttgtctggtttgtagccagcaactcccaccctgctccacccttgccaaaataaaaagaagtaaaagattcaggcaaaataagataatgccagacctctaccacatatgaccataaaggcaaagataatctattaactagccaaaacacagggaatctctctaacaatgattgcaacagtgatgatcaaatatggttgatagcaagaagcagggatggggtaactaggatctacgtctcaaagcaatccctatactaaagggccaaagatgacaggagaatctcctagcaacgaagaaggcacgaactgaaatacccagcaacagcaaagaaataggaagcattcacacaaataacgttctttgatggtggaaagtaggccccaagattcctcctgtaagctacacactaaaaacctctgattgtttgccccttgtcactgagaagattcaaggttaattttttttgagttactggaaacactaacaaaataaatcaagaaaattaaacgttcagccgagtttggcagctgtatgtatacgtatatgtataatatataatgtataatgtatatgtatgtgtatgtgtatgtgtatgtgtatgtgtatgtgtatgtgtatgtgtatgtgtatgtgtatgtgtatgtgtatgtgtatgtgtatgtgtatatgtatatgtatatgtatatataattccagctacttggaaaccagaagcaagagaattacaagttccaggtttgtctggggtacttagtaagtccaaaagccatcctgatacttagtgagactattcccaaagaacattttggaggcactagggctctggtcagtaggagagtgcttttctcttgggctcaatacctacatcagcaccacaaggctaagtgtcaaagataggagagccaagaagaaaaatggcatttcattaagaatatagttatctacatagagaatctgatagcacaagaactgtttgaattaataggagctcagccaggcctgtagataaatggccctattaggaaaaaaaaatcaatacttttcttctaaccaactagaaaacataatattcataacagcaaagacaactgtgaattatttaagaattaataaggaaacgtcctaaccaaacgtctatagagaaaaacttaaagttccattgcagaaaatgacagaaggcatctttgcctgaactgtaaagccagtgagtcacgaagccaacatgtctttaactcaagtctgtaaaacagagccaaaagaacttgttcagaagcatccttttgcaattgtcagttccaacttagttttgggttttaaattagaccctttttaaaaccatcttttgctacatttgtgtttgcttgcatgtatgactgtgtaccgtgtgcatatagcagccacagaggaaagatcctctggaactggggtgataagaacctaacctagcctccgtaagagcaacgagtgctcataaccgctgagccttcctctcagctacttaagttggaattctaaatcttaaccgtctggaccagagggttgcagatgtggtgcagttagttagcagaatgcttgtccagcatgcatgaagatctagattcgacactgtagtgtaaaaccaggcatggtgatacacatctataatcccgacactgtcgagtgcagcaggaggaacaggagttcaaggctacccttcgttgcctagtgagtttgaagcctgactgaaaaaaaaaaatgtcttaaacagaggacaaaggatagacctaaccaaacagaaacttaaaatgacagtgactattgactctgtgtgtgtgtgtgtgtgtgtgtgtgtgtgtgtgtgtgtgtgtgtgtgtgcctgtatatatgtgtgtgtgtgtgtgtgtgtgtgtgtgtgtgagagagagagagagagagagagagagagagagagagagagaaagaaatacaggagagagaagagacaggacagacagacagacagacagacagacagacagaggctgttgagctcgtgtgttttgagtcagaacactcagtttgggcagcagatgcactcactggccatctgagcaggcagtgtgagtagcacagatggccagcctgcactgtcagatgccattacaaagaacaagatcaacatctatttgcagcaggtgaaatgcaatggcatccacacacttttcatgtttgcaaatccagtttcaatctctaaaatgtattcagggggggcagcaaaatgtgtaagtgggtaaaggtgcttctcgtacaaccctgatgacctgagtttgattcccagaactcagagttgaaggagagaacccaagatgtgaaaggttgtcctctgaccatcatatatgcattaccatactcacaccaccaccatcatcttcctcatcatcattatggttaccatcatcaaaataataataataacaataataataatgcgaaaatgttaggtacttgctgtctaatatctactaaaaaacagctaaatatatacaaatgagatataaagaggccatcttttgtcttgggttgactcgaaacttcacagccatgtctgagttctgcctatgtcttccttttcactgtataaccaccatcgatttttctttggggatgcagctctctgagcccggtgggaagctggagagtgtgggcagctaccacacctgcatccctctgaaaccaaggaagaatgccagattgacaggttatcttacaaacaggccaaacccgtggggcctacgtggtcacaagcaggagtatactcctgtgggaaatgtgtgtcagcctgtcatggataccacagatccaaatgactgaactagaaaatgagtgagaacagatcctaagtcaagtcgcttctgaggaagtatgtgatggagagcagacttggaggagggggaggaaagatcaagcaataggtgcctagaaagaaaaccattcagtcttcacaatgcaggaaagcacactgtcataggaccaccagctcctcagatgccccagaaaaatccaccccattcctgccaagggcaaatatggctgagtttgcagagctatttttttttccaattgtactgagcaattgcctgcttgccctcactccatcaactcatgggtctgcttgagttgctctgctctgtgaactcccagtgaccaaacccagagctgtccccactttatggacaagcatgtgtcaattctgcccatatccaagtcttggaggagagttgtgccgatcactgatgaagggttatagatcactttacacatgtatgttttaagacacgcgcagatgaccaactgcactcccaactgcaagcagtcactcgtgactgccttttcttcttttcctttcatgatctgcaggaggaggcaacaacattgttcaaagtttctcttctaccatctgcacatggttcttaattataattcatttatatgcctcctaggacagtgtgggtagtcccgctgaaagccaaaccttttgaaacctgagtctgattgtcaccgtttggtatctaattagggcaattgtgtgctccaacagcaaaagagcatttgcaagtgttaataataataaaaaaaaacattggcttgttcctgagtataaggagggggatgggcaaagataacaaatgcaatgatgagagagagagagagagagagagagagagagagagagagagatgaaaagcaggaaaaactgatctgggaaggaactcaaagattccaggacaacagagagcagaagtaggagatggaccatcggacaacagagagcagaagtaggagatggaccatcggacccacaggcatcttgcagaggtaggagatagaccatcagacccacaggcaccttacagaggtaggagatggaccatctgacccataggcatcttacagaggtaggagatggaccatcagacccacaggcatcttacagaggtgggagatggaccatctgacccacaggtatcttgcagaaaataaagttctgggctgctgaaaaacagcctgacctggactcaattaaaaatggtaattttgaaaaaaaaaaaaaagctgttttctgtggcctgagcatactccaagccactacagccaccaagaaagcattttccaaaaaactcacacattgaacatagtaacaggagcaaagctttgaggttcataggcatgtggtggtttgtaggtgtatatgcatgcatgtatatgatggtcatgtgcagacagacaccaggggtcaatgacaagtattgtccttcagcccctgccacctcacttttagagtctctcactgcatctatggctggccatcgggttccaggggctctcctgcctccatctccccagtgcctgtaggcacatactgccatgcttggctttttccgtggacactgtagatctgaactcatgtgaagcaagcactttattaaactctctcccagccctagccgtgagaaaggctgtttctaaggcctgagtgtattccaagccactacggcccgcattcttaactttgtcaagatcttggatcactttctttagttgtattcgcctcagcagctttatccataaagtctgagataacctccttgtcagaatgactctgaaaattgacttgtctgacaaatattaatcaatcattttctaagtgccagaggacacccaacacggaatggggtccaatctccaaagagccatgacatacaaatcgggcatcactgtcacatgctctgagctctcagagaggatgccccgtgtgttgtgagactcatctaatgctgctaaccggtgagtaggagacatcaggaagtgaaagtaaatgtgacagcccattttcatagtcaagaggagagtgtttgaaatcacataggaaacacacccttggggatgtgtatgagggtcttccaaagagatggaacagagaatagaagatccaccctggctagagatggcctcattgcatgagctgggttcttatactgaatataaaggggtaaaggagctagaggctcaagcatgagtaacatctctctccacttcctgattgacacagatgcaaggtttcttgtctccatggcaataccaaacccttctttccttgagttactgctggtcaggcatttgtcacaagaaaattaactaatacaaccaaaatatctaatagtgttttaagacatagtgtaataataataataataataataataataataataataataataataacaattctctaaggtccaaggtgctggtgttgaagcttggcttggacacttgcttatctcgggagcaaaagaacaagagaaccagaaaacacttggtcctcattttcctacatataaaagaggactatctttctctcatggggtcactgggaatattaaacaatttacttgaaagcatctagcaaatagcaggcacctgatatttattcactgaacgtgaatcgagaatcttctctgcttggagacagataaggagttccttttgattcaaattacttagagaggaacccaagagcttctgccctcccctcccctctcctccctcctctaactcaagtgcaatctccactgacctcagaaatagggctgctttaaagtctgcaaggaacaatctagcatgagctgtattgaaaatagattcgaactctcaggggtgaccggcaatggtcctgcctctgctcagcagccactaaccagcctccttttatgctaagtaacaggacagcatcgagtatatccaaatagctagccattgtacctcagggtcatgtctgcagccatcagctccaaaggaacggagatgggaacacgagcactgtaggacttagttcccattctgtttactagtcaaatgactcttgtgccaaccttaatgaaatgacatgtggaccacatctgtctcctttctccagccccagtatttaccaaagtgacatgcataaaatcagtgcccaacaaatgcctattcgtgactggaaggaatgaacagcaccaataatgagtcaccaccctccagccccaccagtgctcaagcaagtaaaggcagcattctagaaccttctagaaccttcattccccaaagtacttaactgaaggggaaatgccataagcatcattcccgtttctgatagcctggtattatacagagattattccaagatcaatgttctttgttagtaattactgatatatctagggttacttgcatgtgtctacatgtaagtataaatctatatacagatgagcgttatatgtgtgtgtatccattaaccctctgtctcttggtgtgtgctgataaaacacggtatccaaacatcacggtcttcacagcgaagcctaggtttacaatcaacctctgaaactgtacctcagaatgcccacagccagtccagaatcaatagggaatacaagctattctatctgagctggctggatatcaggtcgtacacgaagcacaatcagacactctctaatataaaatgctgtctttattattccaatcaataaacacatttgttaaccacacagctgatcataattaagttctaaacttgcttaaattcctctgacatcctgcggtatcgagccccttcgcagagcatccaccgtcagttggtccttaactctctcatttccctgtctctcttctttttccttccctaggaataaccacatgagccgaaggcacagaactgtggatgggatggtcttataattgttacagttctgatttcttctgtgaaatggagaaactggctggctgaaagtctcctccagtctttcattttaaattattttgttttaagtttgagatagggtctcatgtagcccaatgtgtagccaagaataaccttgaacttctgaccctcctgcctccagagtgctggaattatagacttccaccaacacgccagattttgaggggagctggggaggtagaaggagctatgtccccagcctgctcaaagtttcttcccatctgaatgtcccgtggacacccttctttcagtgactcttcaagctgttctccccactccacacagctctgtacagactgccacggagtccactcgctagatgtagcacttccatggacatcacagcttccctccaggaatcttctccacaacactctttccatgcaaccctctggagattctaggcgtcatcccctccctcccccttcacgacctccaagggcagtcaatgtacaaagatccgacttgcttcaaaacagcgcccctttcttgtagcctctgcacattgcccatgcattggcaagcaatcctttacttaaatgttattgcaattaaaccaattaaaggggccatctgattccttctctaaccaccaaccatatgcatgccaccatgatcatgcccacaagactctggttcaaactggaaaaaaatcaggacctgagtgccacaggtatcacccaccacagaataggacgggtatttctgatgatgtttgtggctcaacctcactttggtaccaccagtcttggaacagcaatgcccttcgagtacctggcccccgggaagaatgggtacatttctgaagaacattcccagagaatagtctttacattctaactaacattcttagaatgagaaacataaaacgctgaaaatcaggggagggggacaggcagaagttatcagaaaactgttgtacaataaaattgagagtcaggcagggcaacttcacccagagacatgtaagcactgggtaagatgtcccttgctgaagaatcaccctacattcccttcattgttctctttgatttgcgtggagtataacccatggtggggtagcttctggagttaattgtccctgatggcacaaatgaaagtgtgtagaaagaaataaaggcacacaagaaaggctaggtgggctgtgcgtcaaggaaacagacaacagttggctctattgttcttaatagacagaaaagaaattaaagttagtaggaaagagtaaaatataaatccacccatgccatggtaataatgcaattgcaaattggccactctaacacttcatacaggttttcatttcaaacagccaagggctgctgtccccaaatgcagcactctgccattgctggaacagcatgaacattgagcccaattaccatgtctaccctcgtcatagctatgaaaggagacaggacaggctgtcttgggccctgtctcctttcaaggccaagctcagctcctcaccttgagtgcaacagtctgtgggcagaaattgccaccattcgaccagggtgtaccatcgaggtgtgtaacttccctgtgttagagttggaaaacagaaaacttgactaacaacttcacacaccaagacagggctccaaaccccaacaagtcaacaaatccccactgtgtacccatgctcatgagcctagcagcatgggttggagtcaaggctgggcatctgccccaggatgagcaagcagttcaccacagggtggcagccagggcctagcagaatactggggaagtgtgaaaggagcattggtagtgtgaagagggcatgaggtacaagaataatgacatgggaagagtgctcttgggttggaccttactggaaatgagcctaggggcagttcgagcactgggtccacatcactgtctctgtgtatgagtggaaggcagataccggatgtgagaactgtcaggctctatccccttagtattttgaggcagagtctcttactgggtcctggagctcaccaactaggctaagcaggctgctcttcaagcctcctttctctgctctcccagctcacgccaccacgcccagctgtgtacgtgggctctggggatagaacgtggatcctccggtttgtacctcccctcgggagcgcttcaccaactgagccatctccccagccccaggaagcggcctctgggctgaactcagaggatttggtgtatctaaggcaagggattagtctgagcaaggacactagagcaaggtgccctgagaaaggcagagaggaggccagcaacagtgatgctcaggggatggacggcaggcagtgtgacctggcaagatggcagacttgatgtgacctggcttacaggaagggcaatggggacagtagtgaaggaatgggggaaatgaggttcagataaggaaccagtattgaacacatgactgacagaagaagaaggattggagggaaaggatcctatctgctccctccaaatcccatttattctcagcctccacagcaaatgggacatggaactgcctttaagagagacttagaaggttgaaggggctggcttactcaggcaatggaggttcctctggcctcctggtactagcaaaggaacaactgctgttgagaagttcagaccccaattttatcattaaaaaccgaggcacttatgacagagcttgcactgtggtggtttgattggaatgatattcagggaatagaattcatctccacgggaacatttcctgtggcgagatgagcattcatacaacaaccctgggctcctgcttcaaactgtccgtgctcagacttctctcctcctccctccatcctagggctgcatgttctacacatttctttctgtctattgctcctcctgacccatgcacacactgccctgcagtgtctctgaaacccttcaactttatcaagaactggccgattttcagttggctcattttggctgagggtgtgtgtgtgtgtgtgtgtgtgtgtgtgtgtgtgtgtgtgtgtgtgtgttcacacgtatgcatatgtgtaaaacaaatcttgtttatattccgcctctcttactccatcttatctcttcctcatcctgtgttctcggccatgacatttcttcttgaatttttggtttttttttttttttttttttgcatgtctccaaacttgcagccatcctgttttaccaaaggcacctgacgtaccatgtacacgggctgctgccgttgcttcctttctcgatgctataattttccccagtgttgaatgacaaaaaatgaatgatcaactgcacctgtgtctcatcatctcagtgtttagcctctgtgcatttgctagcgcccttacacctgcggatggcaggcaccccctcctctgctctcttatattctcttaacctctccgtactattctttctatctatctgtctgtctgtctgtctgtctgtctgtctgtctatccatccatccatctatctactatctatctacatctgtatgtgtctgtctctgtcagtctgtctgtctgtctctctctctcttcctcccttccttcctccttccctccagaactgttatttttacccaggattcacccatggcccctgtgccttcctttctcccagatgagctggtgactcaggtcctactcattcctaactcgtaaagaaaggtctagcttcaaaattagcccatctgtcatgctacctgccttgcttcaaggctagcatgtttggaacactttaacaaggtttcgtgccccctccccatttctctttatcttacttatttaggtagttttgagatggggtctcaccatgtactgctgatgctcttaaacttgagttcctccaggtgtgccatcacacccagctcctttgattaattcacgggcagatgtaagttaaaccttgttttctctatttttctagcaaatactttagctcctggtaaaatgtcgtaaactgttcttacatttcctctgaggtctttctttattccaaaccaaaatatccccattaaaatcatttccaaagcagcttttcacactgctttgattcttttaagaccggattttgggcctggagctggggctgtcacttggtggtagagaactttcttagcaagtgtaagactttcccatctgcagccccacaataggaaaggaggcctgatgccatctcttgtgtagtcttccctactctcgtcttccctcctaaatctatatagaaacattgtcacatagtttgaaagaacaaactcagagcctaccttagcttaatcaatgagctgtcgcccctccccacacacccatacctgatcagtcagcattcttttttcaccctacatgcttgtccacatccccataccatgtcctaaactgtctccatatttttctcagtccttgagagaaagaggtaaaactcgatttgagaaaggttttctacgtgacctcaatacaccacttgtcccacttgtccctctctgaaccccagtgggaagctcatcactgaattctgagcatgttgcccattacgtgaggttgtaagacttccacggaaaaagaagaaagtagttcacaaattgaaaggaggtgctatgcaaatggagaggttcgttattgctaaatggaactgacaaataaattattcatttatgcatatatcactatgtaaattttaactaataacaaagtccttttttaaggtccagtttactgagatataatttgcatacattaaaattcacccttttaggttcatacatataaaagtatgcaggatgtaacaaccatcaaaatgaagtgcctcaagaggacctgtgctttcagggtcaatcctttctctctctctctctctctctctctctctctctctctctctctctctctctcaatttctctctctctcctagcaactactgatctgattttcctcatatttttactattccagaatgctctatacatgcaataaaatagtgggctgcctttttgtgtctaaagtctatcatctgacaatatgcctttctataattcatccgtattatgaaatttttaaccttttttacttccaagtagtatttcttgtgcagatactacactattgatgcatattttaatatttccactttcagtgatcatgaataaacctaacagagcactcacatatagttcttatatagacagatgtgtttatacctcataaggaggtgcaagtaaaccattccaaagaggctataacattatagattctcaccaactgttttttcctgttcttattagttctattttggaaaagctctgagagagagagagagggagagagagggagagagggagagagagggagagagagagagagagagagagagagagagagagagagagagagagagagagagagaggagaaagagagaaggagaggagaatggagggaaagagggagggagaaggagaaacggggatggggagaaggagagggagagaaaaggcataggcctgcaacacacatgtgatgatgagggtaacctctggtgtctgcctttaccttctaccatattcgagacagaatcccttacttttcaacacagtgttcactatattagctggcctgcattcgtccagggtttctcaatctcaccccaggagttctgggactgtggaggcacacagccataactggtgttttatgggttcgaaggatccaagttcagggcctcactcttgcatggcacacacttaacctgctgagccatctctttattccccatcaaccttcttcgcaagaaaactgactttgccttgcctcttcccctccctcctctctactcctttgcctttccttatttcccccaaataaacccccgctttactttcatttagtgttatctcattggagatgtttatttgagttttcttctagtcaggaatgctaatgttcttgccaagtgctgagtcatcaggtgtccctctctatcaatgtccattcagtttctccacatttaagtgttctgtgtggttgttttactgaagttattcatacagtctagatatagatcctttatgtcagatgtgcatttttcaaatttctctcccgctttaaatatttaccttctcatttccttagcactcgtgttcaaaaaccagaagtcttatttttttgtaaagttcaatttgccaattattttgttatggttcatgaactttttgtgtatctaggcaatcattgtcataaccgaaacacaaagttttttctctgatctttttccaaaacatgcttaatttcagaattctctggtagcaattatcaaatttgagcctttaactgcttatacataagatatgtatcaaggtttgtgagtatttgtgtatgctgtacacagatgtactcttctccccataccataagggggaaagatcatctttctccaccacctcaccatcagtctagtccctagctggtgtgaacatgaatccacatctggactttacctggatcaattgctacagctttcctcatttgaaaacataccattttcaatactgctgttatacagcagagctgatcatgtttgcaggcagtatagtatgtagcccactgcttcctacttctattctgaactcattttggccttcttaagcttccaaataaatgttagaactggttgtaaatgtctacagagaaagcctattaggacgctcagggttgaacacaacacaagtacatgagaaaaagtaaactctcttggcattgagtcagcaattgcaggaagtacatctgcaaactctatttgatattatatcttaggcctacttctaattgtccaccagtagtaaataacatataaataatttttgtcttgatatattaatatatttgtgaattaataccttaacgtcttgtgactagcctaatgtatttcgtagctttcttgggcatgctgatttaagccttctcacgatcatgttgcctgtagactaagacagctccacttttgccttttacttcttttcctagtttatatccctggcaatggcctccaatataactatccacagaaatcaaggctggagcttccctatcttgttcttcatcttacaggtagagcagcctgtcttccactgttgggatacgattccaggagattgtgcagatgccttccatcgagctgatggcatttcggctcattctagtttgattaagaaaaaaaaaataacaatcatgtgatctgaagatctgaagataaattcatcggtagagagtttgcatagaacagacaggctttgggttcacctagtttgtcatctgggctagtttgggacagtggctaagagaaacaaagaagacaccatagaggtggtcacagctattcacagagaacataatcaggccacaaaagtctcaaagaagaccagataacagatctgaaacccatgaaaagatgcagaggaggtggaagaggaaatcacattaaaactgtccctggcaccaaaatgtagagaaagaaatcattatcactgtcttggggaataaggtttgcaccactgacatcatttctagatgccacccatgcatcataggaaacccgatgggcaatgaaatataaatattaaacgacagaaaaagagcagtcagaataaaacaaaacaacaacaacaaaaactgtggcctaagtttcaattgcataaagaaagcacataaaagacccctgcccctaagtgtagcacacagctgtacatccctaagaacttgctggcagtgaggagagtaggaagcacttcacaacaaacctctccatgttaacaaaaggactatcacgccttccatccttcttcgcctagtatgaatggcatctcctgctatgtgtgtgtggtcttccatgcttgcctataacacacatcctaatggctccttcattcctctagcaacaagtctgagagctgtagaaggcaaggatgcccacaggaagctttatctggtttaggaaagctacacactgctaaagcaaaaacacaggtctcatctcaaaggaactaagaacttgtttactctgggtcaaagatgagtctccctggaccatggatttgtgttgctcggaataataggtcccaacatggaattggttgcacaattttttatagatacagaagaaaagaaagtcataagtgaggccatttcccagatacttgtggcgtattagagcaaagcagagaagattgttacaggtctggatgttattcggtgacattctcagatgttaggttaggaaaggtgtttgaggtgacagctgaaaggttgtttaggtcaaacacagatgtgggcaatgaatggctaataaggggactaaagatagccaagacaacttgtctctatatcttcaatattccaactctgcataatcatattgttcaaatcagtcaactacgtgaaatatttaacataggtccatggctttttttctaagaatttaagttctcacaacctgaaagttgtgttttgttttcaagcaaaaaagtcccaagaactgcttttgagattccaacttctttataatataaagcatttgtgcataaaagaggaaaaaagatggaaaattaaagactttagtagaaagtccataacgaaccagtattgtcacaatatgactggagccagccttgaccaggaatacatgaactctaggcagaattggtcgaacttaggcctgatgcaaaaccaggtgacacccagtaactagaacctgtgctttacatgggtgcttaaggtagcatgttacgcatgctacaatgtgatatgcatgaaagctcaagtgtcatgcatgaaagatgacaaagtcctcattagaaaagtggaggcgaccctctagctcagcacacaagcatcaggctagtcgtagctagtggtttttctagtgggacaaattaatatagcccagttcctattaagctgtagggcaaaggttgttttccattttacttttacaggcatatgtgctagtttgatgtcaaatgcattcctctctatatattttattgaaaaactgaaaaacatatcctatagaagcttccttaaaaggagagtcttataagtcacttgctttatagatccacctcccctgacttgctcctgctttggtccaagactgaatcctggaccacactcaaccaatgaagaaaacagaactgaaaatacagacaggctaacagatagtcacttgtaaacaatggacttaggagtttaaactagagtgggtgtttggggtgatagattttcaatagtggggcactgctgagtaagcaaaggtagccaagaagtagaaatacagaccaggcagtaggccttcccacagcaaagggaaagaccagagtggaacacgtactggcttctcattagttgaccactatccaccactctgctgggttgctttagatcagtggttctcaacctgtggggtgtggcccctttggtggttccatatcagatatcctgcatatcagatattatattacaattcataccagtagcaaaattacagttatgaaggagtagtgaagtaattttgtggttggaggtcaccagcacaagaaactattaaagtgttgcattgtaaggaagattgagaaccaataatctagatgcacttatatccttactctccaatgatcttatgacacatgccagctccaggttttgatgtctcctaatgacatgtcatatgacaacagaggtccacagactaaatactcactcttaggcacacaagtatcacttattatgtgatatgccccaagggctcctctcagtaataattacacattgtgcaacctcaggttataagtccacataacataaaatgaactgaagtgcagaagactgacataactaagcccagcctgtggagggaatggatggaggagatggggcacatagcctgacagctatctctagcttttatgcttttgattcccaagtgcccagcccccactgtaatagtttgtatatgcttggccaagggagtggcactgttgggaggtgtggccttgttggagtaggtgtggccttgtgaatttgggctttaatacccttgtcctagctgcctaggatccagtattctgctagcagccttcagatgaagatgtagaactctcagctcctcctgcaccacgcctgcctggatgctgccatgttcccgcctcgatgacaatggactgaacctctgaacctgtaagccagccccaattaaatgttgtccttataaaagttgccttggtcatggtgtctgttcaaaacagcaaagacacccacaatgcaagaagtgagaaataaattgtcaacttggaaaacaattataaaggcgagtagaaatatcttagaagaaaacgcagaaagatgcagaaaataaaaacaaaatgataaaggaatatagcatttgaataatgtagatgacttttgaaaagtttcctctgcaacagataatagttacacaaacaagtaccttacaaatgggtacacagttcaaagacgtttcataaaaccaacggccactgatgtttttaaaaatgcttttataactaaatatatatacatcttcatggaaataaaagttccgtctctcctcaaagcttggaaagaaagaaaaaaaagaaaactaatatggaagagaaagcatagaattcaaaggaattcttacaaagaagatcatcaaaagccagcatgaatagaacagaaaaagaaacccgactccttaaaagaccagactgtgcttaatcagagtggcttgcttccagagcacttggggactttcttcagtctgaccctttgccggtctcttagggcaagtgacggttatggaaaatgagtatcggacggaaggaagttgtggatctcatgggttctatttctttggcacaaccttggaaagagaagagcgccaataaatgctcccctgggctgggatctcagaccttcagttctgcagctggcttggtggccaggcatggccaccttctttatgaaatgtgaggaaaactgtgttgtgtcctgtagtatggtggcattggctctgacttgatggccgtgagctgaaccctcaggtctgacaaagttcccagaccaccttcatcccttccagagatctacagggttgttgtctcagtgagaagtcagttacaggctggggtggtgtagctgagcaaccaagtccttgtctagtgcacatatggggttagtccccagcactgaaaccaacaaacgtccaactccgctgagcaaacgagacagttgagttggtattaaaaatagaaaataaaaatagtggagaaattggtaaaataattggaatataaaagaagttattttggggctgaagagatgacttcagtgtgctatcactggctgctcttgcagaggacccaggttctcttcccttcccgaggagtagcctacaactgtctataactccagttccaggaaatccaacatattcttctggccactgcaagtaccagtcatacatgtattacacatacatatattcaggcaaacactcataaacacattaaataaaaatatagatttttctgatggatgaatacaaagagattttcttttttaattgactttttctcatacaatatattctgaaatatatacaatatatttctcatctcctgactcctcacagattgtttttaaaaagaagagagctggtggtgattaactactaaattaatatacataacacacagagacatggaaaacaaaattgccatctacctatttagcctgggatagggcacggaaaatgcttttatatccaggcctgcagaaggaattttaggttagcatagaataattacccaacttaataacatttagtgcttcattttctaactactttgtaacctttgcttaattaattctcacaaaacctctgcgaggcacgtgtgtattaaacacccattttgcaaatgggaaaagcaagtgcaagaggttaagtgacttcgccagtgacgagacagaggctggcatgcaagtcacagtaaagcccatctgttccccaagaccatgccaagccattgctaccctacgaaatggctgcactctcaaccccaaagctcgtctgggatgccaccaaagatgcatttttgcagtggtgaaattggcctggccttcattcaggtgacaaaaagaagggcatctgagtcaaggaggtgaaactcgaggcagtcacagagagaaatgcatggtcagatcagagctcactttcagttactgtctttctccagcctggtagagcagaatagctctaaggaaagcttgaccaaagaatattgaaccaagtaaccaagatccaggaaaaaaaaagcatcgcagatgctctatcatctgaggctcttggctcatccctcatcaaggaaacttctctttgcaacagaagaccattgcacaaaacactaccaatcaaaacgcagagctgtggagcccagttccaatggcttcatctacaaaacacccccacgcccaatgctcagggaacacttcagaagaaggaaagcaaggaccgtaagagctgaaggattgggaagttcgctgtgagattgggtctcccagtaatgtcagaaactagccataaagccttagcaacatggctgcctaaatatacgtgaacaaggactacaccagtgagcctacaacaaagtggatgggggagcccatgaatctcaaccctacatcaagaagtacaagcaactgaggaattctgagggtgagagaaactcttgtgtgggaagacgacatgaactggttacccaatagcaaatggtcagccctgaataaatatggactagtaacattacacagactgagtgggttacatttagggatatatatgtgcatgcatatgtgctcataaaaacaattcatgtataagaggctatgaatttgttagagcaaggagagatatactagaggttatcaagggaggaaaggagaaatgatataattatactacctcaaaaagaaaagaaaaatgaataaatagagaaaacatttaaagctttatcaagattatgggtaggaccacttgtgagtgagaaccactcgaacagtcttccagacctaactctatccttcctgaactgaggaatctgggaccctgtagcccaccagtctgatagctgggtagcctggcttccctcatggctctaacatgccctaccccatctagaaatctgtcttgaatttcagtataccaactggagcctgggtcctcttccaactcttacctctgccttccttctattctctcagtaagggatgggtctagacccatggtccttcagcccacctggacactatgatttggtatgtcccttagtgctggattagaccagctctcttaccatcttcacactcactgtcccctgggtctgctactccaattccatggccccttgaagttgatcttcatggcttgttgaactttaaggagttgagaatgttttagtgctgatgacaaacaggtaccatgtctctgggaagtcctcagtaccagagcaccaaacccctccttttgcttcatctctgcttttgttgagaagctttgggcttttacttcctatgagggttgcatgcctaacgtcatcccctaggacataaaccacgtttgggtgatactgtaatctgaataacttgccaatcagcctgtctagtaccagctcaagaattttcatttaggggaagacaaggggtggcaatgtagttagaggaggaagccaggggacttaactataagtagcatcgctaagtggaaccatttttattaatgcaatgcatactgcagagacaggctgcttcttgaagggttgtccagtcagaactgactgcatttctcccaacctcccctcaactcgttactgtaccagcagttaagtctctaggcttagacatggaggattcataggatggaatggaagacaggtgtcaggcatcttcttgtgcacaatatgactattttgggtgttttgttttgttttgaaatagggtcttatcatgtagccttagctggcttggaacttactatgtagacttgtcctcaaactcgtagccatcacctgcctctgccttcccagtactgagattaaagacatgcaccaccatgcccaactaccagagtgtgacttttgtctagcccagttagggtttaggagacagcagaactcttcagacaccgctgtgcatattttccaccttggcagagggaacgccttggcaccaatggctctgacactgcagactccagcaggagtgagacccacccaagcagacttcctctgcagaggacatttaaggcagcagttttacccatcctacactccagccacaccagacagtctctgctcccagtcagtattcaccaccaccttcgactgattgccatcttccgtcttcagaaatgtgatctttaagtgtgttatgtatttcatttgtgtaacgccctggatcctggattggaacacaatggcagtagattacactctttattttacatacttgaagatcgagcctcttgaactcagtatgcaaatgcctgtgaataatatgcaaatttgcgttttctgccaagacgttggcattttccttctgaggggactgcaaatccagttcaagaaggaagaacatcttctgtgcatcggcgcctccttctccttctatgaaggtcccgaccagcgttaatgatgctaagccctgggaaattgtaggtgccactggattacatttaagcctacaatgtccatttcaaaccattactctgtgcttctcaataggtgtgttacaagtgaaatggggctcccgagacttccctgccaatctggagttttattcttaacctgcatagaagctggtagtctctttagtaattctaaatttaaatgtcctcacctaccatccagatgagcctcatggccttctaaagaaatttagaaaaaaaaaaatttaagtttacaaagctttctaaggtgagatttataatggtgctggtaaaacagggtcagaccggcagctgtaaagctgtcttctctgcttagcctcagagcgtgaactgcatgtgccatacacggcagcccacaccatcgccactgccaccaccctcagcacccaggaggtgccctgacctaagggaaactgccaacaagactgaccaccaaattgataattattcctctagtgaggacaggaccgtctctaaatcatcaaaaatataatatgttaagagtcacccttgtcctttgaaagtaaagagtcaaacaaaaatgaggatgacaactgattgtcctctgagaagctcataccaattctggagtagatcttaccttcttcccaacaagcacgttctttgaacccaactgcttgaaaccgatctcatttttaatgaaccccaactctacttccaaagaatcatggtgacagctaagaaatattcacacttattacatatcaggcgcaatatcagcttgtcatctgagcttcctgataacaactcttgcccaagttcttagacttaataaacagcagaggctagatctgaatcatagaaacggtcccatgactgtgcatacagaagtagggacaaacggacctgtttccgtaggctaacacaagtgtccccaagaacagagctcagctcctcaaattaactctcagcaatgcctttcactggtgttatgacagagggagagaaagaattcacaagctcctgctcccagtggcccagttctaatttgtattttatgcttttatattggattcaacaagctttccacactcttctctgcccctgctctctttgtaaagactattatgtttaaaactaactcgggttcttatgatgaaaacgagcacgggatagacttaccttccctttgttagtgaagttccctaattgacccaggaggctggggtaaagagattcccaggtacctagagctgtaacagtgcacacaatgaggctgaacctctcattcccctccattcccaatgatcaacttcactactcagaagtgacaggggtaaggcagagattgacaccctgaataaaaacagttttgtctataaattccaaccatccccaaaagcccagcattgccaaggcccaagcttccgaaaggagtcccaagagccacctatggcttatatgagtcaccttttgaagactttgagggagtggaagtattcagcaagtccccacgaacggtgtgaaatgacaggcgtcttagagaatgagccttaaaacttgctgtaaatgagtaagcacttgacttcctgcagatacattttcattgatggacctagaggattcaaagcttggagcaggaaggaagacctgggggcagactgagtttctgaccaagaacatcattgttatccttgttattctgttggctctgagcttcgttcaatattcaaattggcttgatcaacattgatcaatggctaacacttggcccatatctgagtacgactgtacaaataaatttgattaagtcattctgaacagctttggaattgcatctaaacagtcatatttcaaagcagcaaacagtatgtcatcaatattatcaataaaatattcatagggcctgtacccatgctgatttctaacagcatggctgcctgctgagaccatatatgttcctgctattctgtgccaatggagaaccatgcaggggacagatggtagaaagcaaaggaacaatgggccattaacaatgatatttctatcattagaaatattttagtgtcaggaaaatcttcaaatggtgacatcaagtggaagacaaaccattatccactgtcattcaaatcaactaatctattggtgaaaagtaggaagagatcaaaatattagatattaataatgcatcagatcctctgatcaacattgactaatcccaaactacaaaaaaatgtgataaaattctagctgtctgtgaaaaattaacatgactgtatatctcactttactatatatctgaaaagccatatcaaactcaattctataatttaatctctgtagatttgaaaaacacatactcaggatcatattatgaaagtttatatttagaactagatttcataaaaataataatacataaaaacctccatcaacaagaacaataaaaatgtgtatctatgtgtgcacatatatgtatgcatgcgtgcatacatatgtgtgtgtgcatgtgtgtagttcatgtgtgtctgtgtctgtgtgtttggtgtgttcatatatattaatgggggcgtgcatgctatgacatatgatttggaagtgcaatctctgaatgggtcctctccttttaccttatttgagccaaggtctagtgctgttcttcatggcatcggccaggctagctggcctaaaagtttccagacctttttctaacttcacctccaatcttgctgtggaaagctgagtttacagatatcaaccaccacgtctgagttcttgcattggtattgggaatctgagctcaggtcttcatgtttctatagcaagcgtaaatcactaatccatctccttagcccaatatttgattcatatatatatatatatatatatatatatatatatatccatatataagtatatatacatgtatatgtaagtatggatgcatatgaatatatatatgtgtgtgtgtgtgtgtgtgtgtgtgtgtgtgtgtgtgtgtgtgtgtgtatgaatgaatgtgtgtactatagcacacatagaggtcatagaaaaatctgcaaaagtcagttttctttttccatcatgtgggtcctgggaatagaattcaggttttcaagcttggtagcaagctaatttaccttttgtagtagtttctttgacttgtcagcttaacctaatctagagtcacctgtggaggtagctttaatgaggattgtatataccagattagtctgtgggtctgcctgtctatgggagactatcttgattatgttaataaagatgggagaacccacaatgggaggcaccattccctaggcaaaggtttctgaagtgtagatgagtggagagagcaagctgagttgaagcttatatgcattccttgctctcagattcctgaccatgaatgtaatgtgaccagctgtcctgagcgcctctctgtgtcaccttctgccataacatgctgtgaacatgaactggaagccagaataaaccctttctcctctaagttacttttactggggcattttccacagcaacaggtaacaaaactaagaaatccagtgagtcacctcagaagccacaacccagcccagcatttttaagagaaaaggggagtttgtattttattaagtgatggcatataattatgtttaccaatataccaagtaatttaaaactcatagcaaatatgaacagaaatatcataagagaaattatgagcatacatggaaaagaatgaaatgaatcagttatagaaataaaaattagcccagcattaaagtgtaattttatctatctatcctaaggaaaacttacttttaaagagcaaatagcaagggtaggatgaaccctgacacattcacaagggaacacaaatgagcagaaagcatttcagaaaatccaattgatattatggatcaaaaagccttaaaactgttcacacctctgaccctgtaattcaatttatggggatttctgctaaggaaagaatgcaaaatgcagacagaaagactttgtacaccaaagtcttcactgcagcatcatttataacagtgaaaaattgaaagtaattaaatggctgacactaagaaggtggttaagtaaattatactatagcactatgacagaatgctaaatagcctaaaaaattatgtttaccaagagtttttaataacgtagaataatccttttgcttgtgctgtgaagttaaatcaaaaacagaagcagaggaaacatcgtggtttcatctctttaaaattgcatacaaaggatgctagaagacaatatccatcgtctttgtcagaatgtgagtgatttgtttccattctgccaacttctctgtttttctccctaaaatatcccacaatgagcatatgctaccttcataatcagaaaaaaaaatgctggttatatgttatccatatttcaaggatgtgtagcagacatttaataggaagagatagaggaaaaagaaaggatgagctgaaatgaagcaaataaccagatgaatgaagactcctgtcccctttccacaatgctactaaatttttaagactatgttgtgattagcaattacaagcctgtgaaatatttacctcattatctgggcaaaattaagttaagtccatcaatctgtcttgcgtcttctatttcctactcgtgacttaaaggagtcttgtgatggatcgtgtgggcaggaagcatctctgtagagtgagagtcatgatccaattttgggttatctggtttatctaaagtgcttcagcctcttgcatgtgaatataaggattactctgtgtgtcaatgcgacgtgcatgtaaagcagacatatggtcaagagtattagaatggagaagcattggttgatttaacagaacacccccaccccactctgtggtgactggaatatggacgggccccatgggctcatatattttagtgtttggtcattagggagtctgcagtactagtcagggattaggaagtgtggccttgctagaggaagtgtgtcattgggtgtgttctttggggtttcaaatgctcatgccaggcccaatatctctctcttcctgcagcctgttgggcagatgtagaactttccagcaccatgtctgcctgcattcttccatgctccccaccatgaggataatggactgaacctctgaaactgtaggtcacccccaattaaatgctttcttgttatggtcatggtttctctccacagcaatctactgctgtattctaacattgactaagacttcacccctcctttatcctatgaagaaactgaggcccagagaagtcacttagtcacttttctcaagctccctcacccatcttgggacagggacagtttgtaggttttccactggttgagaccactgcatttacacctgacttctgcatatgggagaagctgggaagctgaagtatcgtcaccaggatgctcagctattcattcacagactaaaggaacttgaccagctgctatgtggcagagctgtcctcggtgcttggaactgtcatcagtgatgtcaaccagcagcaaaggcagagtctgaagcgatgcctccttcccaggtgctccctgagcagagcagcaattctgagaatttgcaaggccagaactccagaaaagcttaagaaataacagaaaaacaggttccataaacccaactctagccaagtgtctacctgctttctaagtaaagcttgttgtagtgaacaggatgactggataaggttttaggctgaggttttcggaaagaggttttgaaggctggggatacagttcagttgagcgaagtcttgcttaataagcatgggtttgatcccagcactacataaacaaggtattgtggtccataactgagacagtgctcagaggtgggggcagaaaggtcagaagtttgaggtcatcctttattatatagtgagtttgagggctcatttggaatatggaaaacctgcctcccaaaaaaggaacagagaaagaaaaagagaaaaaaggaaaggaagaagagaaggaaggaaaggagggatggagaaaagaaggaaggagggagggagggaggggaagggagggagggaggggaagggagggaaggagggagggaagggagggagggagggaagggagggagggagggggaggcagtaaagaagttttgaatatagaactttaggtctctttcctaactttgaagcctaggaggcatttgctgacttaagagtctgtggctatattgcctatagtagaagttgattaaattatgacttgaagcacaatacctaaactccctttatatctaatggacactaacatagacgtgtagatcattattaagtatattacatagtatgtctatactacttaacaagaaattttaatatacaattattcctacatacagaagttcaagcagatgcacaataactaagaaatgtaactagcccacgtatgcatcaacagacgactggatgaagaaactatgattcatttatacagtggaattcttcagccataaataaagtgaaatcgtggcatttacaggaaaatggatggaactggagattattgtgtgaaatgcaatgaaccagggaaaatactacatgtattctctcacatgtagaatcgtcttgtgtttgtgtgcatgtgtgtgtgtgtgtgtgtgcacatgtgtgtatatatgtatgtgtgtatgtgtatatgtgtgtacacctgtgtgtgtgtgtgtgtgtgtgtgtgtgtgtgtgtgtgtgtgtgtgtgtgatctaaggagatctaaggggcaggaggaaaagagcagaagggagtgtaacatcataatacgtgtcataaaagcagactggagaactaatttagtgaaggaaagacagcaacaagaattggacagaaaagtgagaaagacaatggatgaggggcccaggctagaacaaagagcagtcacgggtgtaggaaaatgcagtaacaaagcctaccactttctctgctaaatatttacactaataggttacacactttttaaaaacgaagtatgtgaatgaaggctgacattgcgatattgggaggggggcaggataatagaagccgccagaaatgagccagctccctttatttggcaatcagctcaaagctgagaacagcaaaggcattgccaggacagagtaatagtggacggggagtcggctgcagagctgaggaagctaaggggcaggatgagcttggctatgacaggcccacggggacggtaattaaagatcaaggcagatatttggaacagcatcaaggtgaggatagagtgcccagcaaaaagaacaaacatctgcagcatctccacggagcgtgaggccgtagagaccgtccacccagacacagttacggacaaatgggcaatctaaggatgtgattattaaaggcacagcagcatttagaacttctgagatatatctccagaatgaatataatgtgtgctacatggtaatagcttctgtacgtcatgctaaaaaataattgctgcttctttattcccatcgtatggtgatctcatggttctgtagacagatggcgtcctcagcaaagttcagaatatgaaacgcaccagagaggctgggcctttgatctttaaacataaagatgattcacacgtctcaagcaacttaatctctctctctctctctctctctctctctctctctctctctctctctctctctctctctctctctctctctctctctctctccccccccccctctctctccatctaccgaggctttaacatagagtatcagtgtagccttgagaagctgttaaatgtcttgcaccacagttttgtcttccgtaaattgtctacccttgcagtatccttgtgaaaattgaatgatggtggatgtaaatatggccagagcatctggctcccgacaaatactagttatgaccacagttacgatgaagatgcttaactgcagaagatagactgctttttcccacatgcttttccattattctaaaaaaggcagccattctgccctcctgtcttccttccttcaattccaagaaatagacaataactggagaaaatcctggcaggttaaaaaaaaaaaaaactctcagtagccttgtcagtcaccttactgcagcaagtcccaggcagaccttcacagcagggtcactagggaataagtacacctggagctccttgaagaatctgtccaaacacattgcctgccaggagagcatccccaaataaagagcccccagtcttactcccattgagctgcaaagctaaacattaccaaggaacacacgcaaaacagcaacacctgaataaagggagctcaagttgactggctaggagactcccaaatctttaacatttgaaagtagtgtgaacaaaaatattgccatctgttcctgtcatttcccaagaaagatctccgtagcccttaagcatcctaactgtttaaatatatagaaaaaacaggctctccaacagagcccagggacctatggaaatcattaactctgggatcgtgagcaagatgcctttctcacaagatgtcctataagagaatctcaaaagttcaagctagaaataatagtctacagatctttaaagagcatttaatatatacacatatatgttaagaaagcacaaagacattgttggtggataaaatatttaaatgaggctgtgttacagccatgtaatgagagcatggttttattgaagggggcacagtgaaggactattactcagttcactagttcagctgggggatgatgggctccagagcttcattatcttagcaacttgatccttatcatcttattctgcttaaattctcccaccgtcatattggtagtaaaaggctacctaaatctagatgggatttaccacaagggttgattttattgatgaggaagatagagggaatgagaggggggagaagaagggaaggatggaaggagaagggagagagagagggagagaaggagggagggaggaggaaagaaatgaggaaaagagagaagacaggagagaagagaaagagcactgacaacaaatacccatgggttaattttttttctccattccttttgagctaatcaaacttcaatcaacaaataggacccatgagtatctaatattagaatgtatcattttctacttcattcttcttagctaacgcctaatattatttgaaatagaactagaggagataatgtaagcttctgaaaaataatatacccagccaccatggcatgtcacttatacatatatttgcatttgctaatcaaaacttattagagataaatcaagcttccggtcaaataccatatcacttattcagagcaaagtagggatttgaaccccggggtacctgtttctgggcatgggatttttaactacaaatatgtaactagtctcttggtttgcatggcagccagagacctccgcttatagccataaggagaacacaagaagcaaatcataggaactggagagatggctcggtggttaagagcagctcagatttcatcacccatgttgcaagctggacattctgcagatacttgtaacccagccctgtggaaagactgctgggactcactagctcttcagcctagccaagaaaagttgagcctcatatcaaagaagagagtttgcctcagagaatagacaagagagtgaaaaaagatacccagccttcttgggcttctgtacatgtgcacgggcacataaactcattcacctacacatgcacacatgcactcacatagatgcacacatgcactcacatagatgcacacatgcactcacatagatgcacacatacactcacatagatgcacacatgcactcacatagatgcacacatacacctgactaaataaatacaaccaagatatcccttccttggctgcctttcacacttcctggtgcattccttaacccaaataaaaataatgacaatagctacctaatatgaatatttctactgctgctgcctccacaaccactgactgagaactgagttttgtcaaactctgtattgaatttatataaggatcatgtttcccatttaagagaaaacttaaaattcagaaagcacagtggcttgcctcaagacattctagtttataaggtggagacaagtctagaagccaatagagtcaaaatgcattataaattcaaaatacactagaaaagacctggatgctagaatcaagaccacattaatgaaactgacataggaggctgacgtaagcctaacacctacttgttcaaagccaaaaagaaaagtcactttcttaaactggggggtgggggttgggggtggaaaggccctcacggaaaaggatggtgcactgttcaacagaaataagacaagacaagaggatctggcaaaaataagtgggtcagtgccaagctgaagactttcatcacatgccgatcgggtgctttacataagccacgttcaatccaaatgacaacgaaaatgggcaggaatgtcctaaggagtgtctcttttctgccctgagcactttgaaggcagacagtgtagtggtaacaagtgccagacacacattaaggaatctataaatattagatttaattattttatatgtcaaaatgataagttaaaccaaatgattcatctggaattaaataagtcaaaagggggaaatatccaactgtctgcttcctgttagatcatataaacaaagacaagtgcgttgggtctgaagttgagaactttttcttattttgtctgatctaaacccctcgggatatgtagccatggctgtgttctctttcaagaaatccacaggtatgcttggaagatgacgacacccacagagttatagttcaaggatttattccatttttcattgtttatgtatgtgcgaaggttcacatgcaagtacagggctaatggggtccatgaaagggtatgaaaccccttagcgctgcagttataggttgtgagcctgaagtggctgatgggaactgaacttgggccctctgcaacagcagcacatgctcttaactagtggccatctctcctgaacgagaggtcctttgattttttttcttaattgagggataatttacagcagtcttcaagcctttctccaagaccacacatgacataccactaacttgtcaggtaacaaaccaaatttcctaccaattcctccaaagaataccttcatactactccaggacccaaaagagtatctcctggcacttaaaccctctcattctggccctctcttatcaagtataataactatattttcttcctttcttcatatttttctttttatttattctctcatactatacatcccaacctcagcctcccttcccttcctcccagtccctcccacacacctccctgtacccccggatctgctgctcctctgtttctcttcagaaaagagcaggtttcccagagatatcaaccgaacatggtgtgacaagatgtactgagaccaggcaccgaccctcacagtttgtcttagccaaaaggctaagagacaattgatgtctccaaattatgtccccaaatttgcatgttactgtttgctttttttaccgtatatgaagaaaaacacagtgcatgtatttacttcacctctcagcttctctcactctatattgtatttctgaggggcagctacattgcacttcgtctgccttagttaccaaattctgttccattctaacgttgtgctttaatttctgaatctgtattagaatgcagatgagacctttgaacagattcccaattgtaggtcatcctgtcatctcaatttgttatccaagaacattcatacaatcacatatggggtcctctgatatggccaattatacttgaaaaagccacatagatgtatccttctaagtctatattccaccaatgtaaaaacaaaacataatcaatacaatctcttaacttagcattgtcactttttttaaaaattagggctggagagatactgttcttcagaagacctgaattcagttccaagcagccacactgggaagctcacaactacctataactgcagatccagaggatctgacgccctcttctggcctcagggggctctgcatgcacgtgcacatacccacatacacagccattaaaaataaacttaaaacattcaaacattacccaatccgttgagtacaaagtggtaatatatgatggttttcattttcactttctggttttctaatgagattgaatgtccctttcatatagttattagccacttaaatattctcttctaagaaggggcagtttggacattttaatactaaattatttcttttattctcattacatgtacaagaatatcaatttctgtgtaattattattacttcttatctatggaaactggcctaaagttgtgttagcaccctcacgacttattatggatatatagtagcttataaaatcctgatcaatgctatcccatagggcagtcagtgtagcccctaaaatgtggataataaaaagaaaagacagtttaagttaaattatatttacctaaatttatatagctacatgtggctactggctatcatactaaatagtacaatattaaatattcaatctgtcaattaccttaaaaacatattttccttttctatgtccatctttctgctatctttattgaataatttgacaaatgaactctgttagtcacactttttatcactgtggccaaatatctgatgaaacaaactaaggggtgaaaggtttattgagagatcataatttcagagtttctaacttgacccatgagcttgggcagaattttatggtggtaggtgtgtacaacagagaacaacggtctctggggaatgaaacctgggaaagagtggcagagagagttgggacagaggaagtaggaaaaaggaaagagagaggagaggggatgctgggcgagagcacaaacctgtgccaagagctatctctctcttgtattccatcagaaccctcagctctgggatagtactgtcacattcagggtgcactgtccttttctgcttatcctctctggagagaaactcatgagcacactcaaaacacgtgctttataaatctcctaggcccttctcaaacccacaaaattggcaagcaaaaggaaccactggctgctgtcctgttgacacccagatgcatctatttaaggtaaaacactccctctctggcccccacaaggatcgtgtccctcacacactgcagtgtgcattcaacccagctcctcccgttcctagcggtttcactgttccaatctgcttcaagagtttcagtttaaagccactctgggacacaaagccagctcttggctatgatcctttataaaagcaagaatgagttacatactccaaggatacaaaggcactaagtaaatatctctattgcaaaagaggaatatgaaggactagatgaaagcaagatccaaggccagcagaacaaacattgactcttctagattcgagtctagcataaggtaggtcatttggtggcttaatgtgacttatgaagggcttgctgttgtgtgacaacttttcttgaagagaagcaacgtaaaggtctactgcagcccctacgtaggcatcacataacagaccaaagtacaaatagcactaaagtccaatttgatgaaccaatgagttttattagagttactttcaagagtacaggtgagggattacttccaagagcagaaatgactcaaagatagctgcattaccagtgcccagtccagcactgttgttaacagtgcaccagctgggaaacctagagcatactgcacaccgacaggcagctcagcaggttagagggtgtcctttccatgcatctctggtgtaaacctctttcaggcagctcgctcatttctgctttttacaggcagctggtctggtcctagagtctttgcagcttaagtaagtctgataggaactctcagcttccatcacttcctccagaaaggagaggcctggtgaagctgtaagtttcagggacttcctggagctattctgagttgtttgcctaccttcttccctgcaggaaactgtttgacaagacctgccttgtactccatgccagttacaactgctataggtttcttagactgcatctggtttggtccctgatgccttccttggcaagacagtcctgattcaagagcaaaacagcttcttctggacatgacaggacctttgccctcatgaactcaagagtagccatggttgcctgcacaagacctgaacaagatcacattgataacattctatcatggaatagcaaggagcttatgagccctcacacctaactaatctattatggacaggtgatggcattgggggagcaaggagaaaaatcagttttctttaatgatggttggtttaccagacccttcaaatagaagcgtatgtacagcattagaatcaatagataattataagggggatttttttgtgtttcttttgttttgtttttacaaaaagatgagaagaaggaactgttaaggtgagaataaatctggagagagttaaggggaggcgctgctgagggtggacacaataaatgtgcattacatgacattctccactaataaaaatatttattaaaaaaagattttcaaaaaattaactggtctatcacatttagcctaacctctacaaagtgtcagggcatgaacaaaatgtagacaagctttttgccagaatgtaacacaaatagctgctggttccattcccaggagactccttgcctctgtctgacgcagatcactgtctgtgtctgtcattttgccactgtgacaaaacatccagagtcaggtttcagtaggcattcggttttgaggtttgagtctgtgcacacaaggctcagtgagctttggcagagcatctgggtgctgccattgtgtgagggaggacttctccaccttgtggtaagggaagcacgcagagagaaaacacctgcaacctggatttagttcacagcacccacacagcagctcacaaccatctctaactccaggcttagaggatctgtctccctcttctggtctccttaggcactacatgtatgttacatccatgcctgcaaaacacctagacacctaaaataaaaacaataagtaataaaatatttcaccaaaaaagtttttaaaaaggaatatgtcactcatgattagatctttaatgtttcccaaagtctttgtgtacctattgaaataatataattttgtcatttaaacttctaatgtgatgaaatatactacctgatttttttttaatattttcaaccttggactccatgaaaaatgcttggtcatgatatgtaagtaatttcaaagattttggatctcatttgctgcgatattttcccatctatatttatgagtataattgacctataatttttctttcttgtgtgctcttgctgggttttagtattgaggttacctgaacattctgaagagagagaaaataaaacaacaaaacacttgaaactcatctctttttattatcttgatgagtctgtataaaaattaatgagatcttcttttcacattagaccacttttgccaatgaagccatcacacccgccttggtttttaaaggaacatttcttctgctagcaattaaatgttttttacgataatgtttatttttcctatttatttgtgaagcagtgttggtaactcctatcctctggggttttgttgttattgttttttgtgggttttttgtttttttttttttttttttttttaccatttcagctactttaaatttgccagcataaatatttacaatgacctttcatcttttcatgagaatgctcccttttatttcttagaggatatgcgcttcatattacttcctgctgacctgtcttgtacgtaaaggcacgtttcttttcctaaaatatttactttatagtctatcatcaacttaatttttactctttatttccctttgtattttcagattttaattttctttaacttcatgagaaaagtgtagtttattaattttcagtcaatttttaaaatataagctatattaagagaaattacccaaggagctaaagggaactgcaaccctataggtggaacaacaatatgaactaaccagtacccgggaactcttgtctttagctgcatatgtatcaaaagatggcctagtcggccatcactgcaaagagaagcccattggacttgcaaactttatatgcagtacaggggaacgccagggccaaaaagggggagtgggtgggtaggggattgggggggtgggtatggggggaagtgggtatgggggacctttgggatagcattgaaaatgtaaacgaggaaaatacctaataaaaaatcattttgactgaaaaaaaaataaagtctcttgatttcacatatatttttattttgctattagacttgtaccatctaaaatctttctaggaacctgaaaacattgatcaattgaagtgactcatctgtctgaattatattttgtctgctattagtgtagtcatagcaacattgtttgattaacattttaatgatatatgtctcccaaacatttgtgctcattcctttaatatccatatattttgtagatgtgcaatctagtaaagcatgccatttgatttttctcataaactcagtctgctatttactttttaaatgtgagcagttttagttattgggaccacagtacagtgtgctgtgactataaatctattccctttatctgatgctttctctctgagccctctcctctttcttttatcctgtctttctttgcattcttggcagtgactatttttataatttttaatttcctatctgctacattatgtcagataattggtttctattgttttagggattatgcagtgaattaaaacatgtctgcttaatttatcacatcttaaagtaactaaataccattagccttatctcaggaactgtaggcatcagagggcactctaagcctctggacctccctgcctaagttaaaagtacatcttggatgagcatttctcagtgtgttatctttgatgggattgaatacacttaatgctcattttaagttcactcacacacctgcctacccattcttcactccatcttgtagctcagacagtatggcttaggctttggttccttctgcctaagtcagaatagcagcaagttctttggtgagagtctgtggttgatgaagagtcagcttctcattttcctgaaaagttttaattcattcttagcaaatatattcactggtaatgaattctgcaataccagttattcgcctcccatagttcccggcccagcttctgatgtttctatggatttgtcagcagtcattttccccaccatttcactataatatttttctctacattctattaagagattacctatctagttgatattcaaacatgatagtatgacataattttaaggtaggaaacattttgaggcatagcatctaaatttgtttctttgtgatccttggatcttttgaatcggtagatttgatttttttaataaatatgttcaatcataaatacagttatatagccataggtgggtgtagacaacacttgaagccatgcatttaaacacatgcatattcaaaaatggtcatgtacttctggaaaattaaactagttatggtcatgattagtcaaggatatttctatggtattatttctccactgtcttgcctagcttctggtataacttgtagaaaattctatatgcctggaaggatagggaaaatgcctccccctacttcctcctggacagttcttcagaccagtcatccagttcaccaattctctcttcaactatatacaaatcagccacataaactctttgatagcatggttgtaattttaattccaagaatggttcccttaaaaaccttcaagaatacttttgtattttcctttaaatgtgctctttatatttctttgaatatggcatcttcctggtgactctaacgcccagggaactggccgctctgcttctgtatctgtcatttcacggggttcttgttagttttgttaaatgctagttatgactggctgactgcaaactaccctaggaaataagggagcgaagaggcagctggctctcagctctcccggatcaaagtgtcatcttccaaagatcaatgctgcatctgatgggtgtttgggattactgattcgatttagagtcatctcagactgaactacacattgttgcaaatatgcttttcaagtattctgataactaagaagccagctaggattacaattcctgaggggtgtttcatgcttttaccctcttggtgcctttctgtttagcctcaggcaactctccattgagttgcctggtggcatgactatggtctcatctggctctgattataatttgatataaagggttcctctaggcttccaacttgggttgagtcccaagctttatttctgccctcattggccaggacaggaaactacaaccaaccttctagcactggcaaagcccactgcagcagtggggctcgctgtggttttttcgaatgggaatttcagccttgtgatgcctcattatcccatggaaattcgatgttttttcaggggaaatgcttttattcagcattctaatttgtgtttatagaaatattagtctgaatagctgtgttgccatgtttccaagagtgaaatagccttttcttacatttctgtcgtttcatttacttccttttgtgcctgggaaatgtccatatatccacaagcagtcatagttttctctccagtgtctagtgagacaccgaccacaaagggcactcctcaatctcctcccagcttcaggcaatggtcagtcaatcgccagaggaacttttaaatttccaggagcaatgggctttagaaaggcagctgcctgtttgacaacacagaagtgattgactgcatccaatagatcgttcgttttcatgtggcctattacaggttcatgttggtttgtgtggtgtgtgtgtgtggtgtgtgtgtgtgtgtgtgtgtgtgtgtgtgtgtgtgtgtgtgtgtgtataacaatttcattttttgacttgggtgaatgaagactgtgatagtacatcccatagctagaccatcctaaggatgtcattgtcaaaatgtgtgttttctacaaaaagccattccattagtaaatgggactaaccagtatagtatcatagtgacttatggttttaattaaatcactttctggatagagtttagatactaggtgcatggctcttcctgagaataatgtttgcatcccatctaccatgtccctcacccactaattagctgtgcaagttgataccagatactttatctgtcaatccaacgttgtagacacagagctgaggacaagtcccccatgctgtacatttctaccagggacttttctgtcctcaaactaatatcctttatagaaggacacttggaaagaagctcttgcataaactagttatgtaaacaacaggaaagaatatcacaggcaatactctaagcaaatgccttcagacacagggatactaatacctgcttctctttatctggagatcaagaacacacaaaagttatctaaggctgtcagaagtctaaatggtaactgtgtcaggacgtggaatgacatgtactataaagagctgaggaatacactttggggttattggaaatgttttaattcactgtctctctggttaggtgggaatgcatgtctgcacatgcacttgtgtgtgtgtgtgtgcaggtataagattttgcatatgcttggcccagtgagtgtcactattagaaagtatgaccctgtttaagcaggtgtggctttgttggagtaggtatgtcactgtgggttgggctttaagaccctcatcctagctgcctggaagccagtattctgctagcagccttcagatgaagatgtagaactctcaggtccccttgcaccatgcctgcctggatgctgccatgttcccaccttgatgataatagactgaacctctgaacctgtaagccagccccagttaaatgttgttctttataagagttgcattgttcatggtgtcccttcacagcagtaaaaccctgactaacatagcaggtttgtatgcaaaagttcattataggtttatatatatatttctaaatgtattacatatgagtatctttttgaaatgtaaaaataatgattcaagaacctagaatcaatggatttatttttttgatgtttcctaaaattcagaataaaataatttatttcttcttaaaaaggaagaatatatttaacgtattgttgaccatgaatttcccacttgaaaatgtgtacaatatttaaaaaccctttctttgtttctttatttaaacacacactgtaaagttttcaccagctcagtacagcatcctcatccgccctactccctgctcccattattgtgaaatcatggtgtctcacccaacacaccttagtgtgtcccttctcctctggaacagcaccagtgtgctctgtgtggcacactcatcaaccactttagagcatcaagatgctcagaggggcccggtaagtaggagagtggcaaggcctctgggattctatgtacacactacgtcagcatgagcagctgccagttcatactctgtcacagatgcaagttctggaaaccaacataaatgtatttgcttctttcgtctgcctttctcacactggtcgaagccactgagccttcgatagcacagaaatatcactgctaaaatatccacttatatcaactaaaatattgacttggcaaacacaaggctgaggccattttcttgttctattgcagaagaggtttcaccatgtttaaaagtgcaataaaatgatattttcttataagatttaaagtagccaagtcacttcctaaactaactgtcccatattgacaatcaacatggggattctggaggttggaccttattactgttaaatgcttgctaagtattctggaatgctaagaacagtacacattgtagatggatcagcatgctataccccgtcccgtgaagaccttagagtctgtaaaattcacaggatgcacacacccacaccctccagtttcttccagagaacttgtacaggagcccacgtagaagaatgcaaatcgatccattcttatctccctgtacaaagctcaagtccgagtggatcaaggacatctacataaagcaagatacactgtttttattttgttttgttttgtttgtttgttttttggtttttcgagatagggtttctctgtatagccctggctgtcctggaactcactctgtagaccaggctggccttgaactcagaaatccgcctgcctctgcctcccaagtgctgggattaaagatatgcaccaccatgcaagactgaatctaataaaagagaatgagggaaagtcagacacgtgggcacaggggaaattttcctgaacagaacaccaatggcttatactctacgatcaagaatcaacaaatgggacccgataaaactgcaaatcttctgtgaggcaaaagacactgtcaataggaaaaaatggcaaccaacagactgggaaaagatctttaccaatcctacatccgatagagggctaatattcaatatatacaaagaactcacgaagttagacttcagagaaccaaattaccctattaaaaaaatggagaacagagctaagcagagaacactcaactgagggatactgaatggctgacaagcacctaaagaaatgttcaacatccttagtcatcagggaaatgcaaatcaaaacaaccctgagagtctacttcacaccattcagaatgactaagatcaaaaattcaggtgacagcagatactggcaagaatgtggagaaagaggaacactcctccattgttggtgggattgcaagctggtacaaccactctggaaatcagtttggcggttcctcagaaaattggacatagcactacctgaggacccagctataccactcctgggcatatacccagaaaataccccaacatgtaataaggacacatgctccactatgttcatagcagccttatttataatagccaggagctagaaagaacccagatgcccttcaacagaggaatggatacagaaaatatggtacatttacacaatggagcactactcagctattaaaaacaatgacttcatgaaatttacaagcaaatggatagaactgaagaatatcatcctgagtgaggtaacacattcacaaaagaacacacatggtatgcactcattgataagtggatattagcccaaaagttcaagatacaattcacagaccatgtgaagtacaagaagagggaagaccaaagtgtggatgcttcagtatttcttagaagggggaacaaaatattcatatattatatggagataaaatgtggatcagagacagaaggaaaggccatcagagactgtcccaactggggatccatcccatatagtcatcaaacctggacactattgtgtattctaggaagtgcttgctgacagaagcctgatatggctgtcttgtgagatgctctgccagagcctgacaaaaaaagaggtagatgctcccagccaaccattggactgagcacagggtccccaattgaggagttggagaagggacttgaaggagctgacggggtttgcagccccatggagggagtaacagtgtcaacagttcagacccccagagcttccagggactggaccaccaaccaaagaacgcacatggagggacccatggctccagctacatatgtagcagaggatcaacatcagtgagaggagacgcccttgggcctgagagggttcgatgccccaatgtaggagaatgccagggcagaaaggcaggagtggatgggtacatggtgaagaggcaaggggagaggggatggggagagggggtttcagaggggagacctgataaggggataacatttgaaatgtaaataaagaaaatatccaataaaagagggaaaaaatgaaatgtaattattcaacaaataatttaatttttccttgttggcaaggcaggaggtaggggtcagagctggaccacttgaatcaaaagcactttaccatttgtatcttcaaaacaaagaccatattagaagtcatgtataattgtcataattcctgggataaaatcaaattaactcatcaaccaacaacaacaacaaatgtcaagtgttatgcagagatggagactgaaccaatttatataaaatttcaaaagcactggccttggagagatggttcagcaattaagagtgctggttgctctttcagagaacccagattcaattcccagccaccatatggtagctgacaatccacaactctggtcccaggatatctgtcaccctctgctggccttcaggagcactgcatgcacgtggtacatagacatacatgctggcaaacacccaaacacatacaataaaaccaaaaaattaaattattttaaagtaataataatttgttaaagcctatgggcctggctatgattgtattttgctactggaagcctttgtctcccagaaccatacagtcacctcacctgaaactaattctccatacaagtcctccctcccgctcctccctctcgctgtgctagctcagcctttgcctcgccggcttgtattactaggaggcctctgagggaactctgcaaacagctttgaacagatttggtgagcctcctgcacacttgtcaaggacagtttttctcgtatacatttctccaagaaaccgcatgcggtttgctacattgtttcttgtgatagtatctttctgtagtctaggctggttcgaaactcaggttgccctaggatttagtgctgagatcataagcatgaactgccacatccaagttcaaggaatgttttctaaataaaatgtagatttcattgtgtcagtcctctgcccaaatttttcccagatgattctcaaagctcaggctacagttcagctcgatcccttggcaccacagaaagctcttctctctgctgtgcatcttttccgggtttttacttgcatcttggagcctcccttgggggcacatttattccattttatttttctttacttgaagatttcacaagtatgtttgcttgtacctctgttaactctgagtcatactgaaggggtggttagggcatccttccccaacacacacacacacagacacacagagacatacacaccgacacagacacacggacacacacaaagacacacacacacacagccactgaattattatttagactattattatatctaaggtgtttcttcattcctagagctgactgcaagccactctatgtcttcatgacacctagtagacacttctagtagaacacttaaatctatagtgaatcttctgggaaaaagtttcaccccccttttttttttttttttttgtattgctgacatttggcacagaatgcataagaaaaataaaaggctaatgatcctaaagaagaatacaatattttttaatgaaggaatgtattcatggatgatcgctccaggtgtttagccaaataggccaatgaagggtagatgtcagagcctggagcacaaggccttgtggggaatcgagagacagagcctgaggaaatccgtagccaggagcacatgagcccagaagatgctctgatcccccaaccctttgcagagtgtttgtcagtatttattttttatgtggtccatagttctccatggcttcctgctcccaccaagcaattgatcgaaatgccacctcattcctttccacagactagtgaacagaaggcagtttctccttgttccatttgtcatgaatccccatctagacctcgaactgtccttccaccccagtctacataaaatgcccctcagaatgtgagtctggtgtgggagatctcctgcccattgcccatcagtcagagacagatccattgcggaaggtgacgtagtcacggatacccctgggaagataggcaaggaccaccttcccgtcacattctttagtctcctcctatacttcttttccccatctccttgccctatttcttcaagtgaaaacaaaaaccatttttagctggaaagcagcaggcttgactgcccaagccatcagctctgccacactgactggtgcagggagacagagatgaggccgggagactgggctggatttaacccggcctccgatgaccctgctatccactcattaggatggagatgctattgcagagactggaaggctaacattcaccatgctacaatttatcaaccgcatgcagggaatgataaccgagagggtctgccagcacaaggagaaacaggatcaagagcaaagctaaagaaagagaaggcaggccaacgtcagagaagaacagagggaatggggggatacatgaaacaaggagaaaagtgaatcacttgtcaaatgtttagcatttgggggaaacagtgtctgaacaacactctaaggaattagtattcccatcagagctacagatttaatatcactgtcagaaagtcaccatcgagcacaccgggtctgagtggcaccgctgccccacttccctgtacaaagctctgtactcttaacacctagtaaggaagtggcctggatctttctgaactccacgtggcctctgcaacaaagtatatgcaggacagaaggagcatggccctgggattaagaggtgctcagttccaacagcaggctctgatcccagcctggggaaccgcggccggcctccaaccttcccgtggttccccgtcaatattgattgtgctctgcatacttggtcttggtttctgctcacctcgggcattatatcaaaatgttgtcttctgcctttctggagggtcctttgtcctctacctctttaatctttatgaataacctataaggcagctgatgtcttcaatagctgtctgtctgtatatctgtttgtgacagggtttcaccttacatctcaggatgtcccatatagctctgtctggccttgaactccagatgcacctgcctcagattctcaagtcctgagatcacaggcttgagtcaccacatccaatccatttaatattcactctggaatatccattccccacctataaatgaaggtgaatatagtggccttctcagatttgtttggggagatgctactatttgtgcaaatgttgaactacagtgtcagtttttggtgcttctcagcctggtgaagcaaggggccaatcgagggatggaaagatggatcaatcaataacatgacagccacacaagcatgagggcctgaatttgactctcgggcacacatataaaattcaaaccgggtggtgttcatctataaccccataatgagattgttgagtggacacaggtggactgatggagctcactggccagccacactagctaatctccatgttcagtggaagatactgtctcaaaatcaatgtgcagagtaatctactggccaccacacacacatatgtgcatgtacaccggtatgcacgcatgcatataaatacataaacatgcatgttcactatacatgcatgtacttatatgaacatgcacaacatgcataagaaatcgggtagaggagttggagggttggtggtgtgcattacacactcctggggtcactcaccgactctatacagaatggcaggtgagcagacaaggggttgaatagactgattgttattctggcttgacttgtagctctgtaccctggtgcattggtcatatctcactccacacagaaaggcatgaaagctctctatccacatatagagagagcccagtggccctgggaaactgaccccatgtaaagaaaacacgcggcccggacagagacgtttcctgtgtcttcacttctttaagtcgcctctacatttgtttgtcttgggacaataaaaaacttatgcaagcatgggatgacattagcattaaagcacagccgtagtccatgtgtaccagttcaacatagtattcaggaggctaagttgggagggtttctgttgaagttgaggtaatcctggactacatactaaactatataggtcatcggggcatgtagtgcaagtccctgtcacaaattaaaaaaaaaaaaaaaacaaggagaataaaagcctaattacaaagactatactggaaatcccaattccttccatgtgtcaaccccagcatacagcccgacgcacccatagaatgggagaagtgagtgacaaaggagagtttctcatggcgcccccttcaagcagcagctactccaaggaggggccccagctgtaaagctgggagctgagaatggcacccgttagggtgacaggttggtggggttgctgtctgagagaatggggtgagtcatgctgtgccttcagcctctggtccagcctctccaacgcttgcaaactctctgctagtctgcagtaggccaattgcaagggggcatttctccaggcttttatttaaggtgttgctgttgtttggggtgactctagaaacagaggagttgatgcatcttcctctgttcccagtgccataacattcagggatgccacatatctgcaccaccaaccttgatccaggaccagctgagataaacatctcagagacctatgtgctgtgtgaacttagacaactcctcactccaaatatggttcttgtctataaactaggctaatatgcaggatactgtggtgtccagctgcaattccaggacttgggaatctgacgcaaggagatgtagagtttaaagtcagccagagcttctcagagaatttctggccagcccaggctgtcaagtgacaccctggctcaaatatcaaagctgggggtgtgtttcattcctgggtcagtcatgagttaaatgaattaagatgcttaggaaattatacttgatacacagcaagtgcaaccaccactcacatttctacatggttcctgatgcccattcgcctcacaaagtctcctgctgaagcattctttcctgacatattgacaattgcgctcacccggcccctaactaccttaccctcttaaacccagacaagcacttcaaataagggccctgtccctgtgtgaccttgtacatgttacttgatggctcacccctgtatgctagctgtccatgtcctagtgggtgtcccacactcattcccacacaaaagctgaactagagggttactgttggcaatgtaaacataaaagaagcacaagtagacactggagagaggtagaaaaggacgtgtgtgatcaaaatacattgtagagatgtatgaaaatttcaaagaataaataaaaatattatttccttaaaaccatgcctcacttacaggataatagaggccaacataacccgtcctgttcctggcatttgtttgtagcacagcacttcattaaattctaatttgagtctaagccacttcgtgtcctctgtctccactgggtttcaggcctgctagttatacccatgggcatcacccactcctggccacaggcagaccaaaactatctgctgatcctcttctctattttaagctgcacctcccgggcctgcttctggccattctaggaaagtcaggcatcttcgtcaaagatgccacattgaggcctccagtagtcaggcacagaaagtccaacaagactttcggcagtggtgggacctttatctgctctgcccggtacaggagccacatatggcctctgagcacttgagtagtagttcactgacttagaatcaaaatttctattatttcatttaatttttatttcatttaattttaatccacttaaatgtaaaacagccaactctggccaaaggtgactgcatgagacagcaaagccttcaagatgcctccagttggagccatggtgcaggcaatgcaatgcaccccaggcaatgcatcttcacctttcaaatgtgcatctggtatctcaacttgatctttgcatacctatcaagagtatcctgttagcatgcatgcacacattcatgcacacacagagagcaattcattcagtggctatttctaatcactgatgatctagaaaacatgttaaaatgcaagggagtagagaaatggctccgtgggtaagactatttactgtgcaaacatgatgacctagtgctggatctctagcactcacattaaaaacctgagcatggctgtgaacctacctgtaaccctacttcttggagcaggggtagaaacaggagcatcatggaagcttgctaattgcaagcttggcttcagctttaataagagacatcatctcaagaggataaagtgggtggtgttagagtagcaagcccaatgtcttccttgggtctccacagatatgtgtacacacattcacacacacacacacacacacacacacacacacacacacacacacacacacacagcagagtcagagcctatcctcttgaggaacattcataaattggaaatatctcttcaccagctccagaggttttcatacagtaggattattatgcatgatactttggcaaaagacagagagtttaggccatcagctaaaattcttattcactgacccaagatgaaggccaacgagccatttcttaaaattagatacttgctgcttccatctctctgagtcaaggattctacaagaattatcttacttcacaatatttttatcttaatcttgccaagataagattccaagaagcaataaagaatattaagttagctttcattttaaatcagtaagtttgttaggtttgaaaccataaataaattatcttgtttgcctagctgagactggccctagaaaagagaggaccatccctctcatttgaaaagagagccttcctgtagttctttgactttcattccagagtgagaaatgggtggcatggatcactctcaatgagttgttcgagaccaaaacaaatcaaaaaaccttggcacaggtaggagaaatctgggatggaagaacagagtcacctgttgtctctgttcatgactttcttattgctgtgacaaagcaccatgaccaaggcaagttacaaaagccttcaattccagagggttaaagtctatgaccattatagcatggcagcaggcaggccaggtgggtgcgctgctgctgctgctgcttctgcactagctgaaagctcacatcttgatccaaactggaaggtgaagagagctaactggaaatgtcatggacttttgaaaccttttaacccaccctcagtgacacaatgcctccaataaagccacacctcctaatccttccaaaacagttccaccaactggggaccaagcatacaaacatatgagccttggggtgggaggaccattttcattctaactaccacacctgctatctgatcatcatctaccaaatctttgctgaatgtcaggttggcatggagaacaatggagcacccatggattctgggacaaatttgtaacaaccaccatatctgagttgcattagacacaaaagatgcttggaaccacacacaaaaaggagccacatgggaagagtcaagaaggcatcaggtgtggtcctttggtctacagggtccctggaaccacacaggggagcagtgtgatcaaagcaacaggcttgatgtcagacatacatcagctctagctttcaaggcctgcacggccctttcctccttgtgtgcattttttttttcaaaagacacgtttctttacattctggacctcacacccaaaatcccagcacactggagactgagacatgattatcatgagttcaaggccaggctaaactacaacatgaaactctgccttgaaaacaaattagaaaaagaaaaagagggaaagaggacaagaaaaaaaaaagagagagatgcaagagaggaacggagggagggaaggcggttcaagaaagactttaccagaggtatattgtaagaaggaaccttgaccaagaaacatatcaagcaagtgtgggaacaagaacatccagagaacacgggaagagggtggaagcaaataaagatgtgtcttctataatagagagagaacacatggctctgtcacatcttggagtgtctcaatgctctcaatcctgcttgcccccttggtcctcttccaaatgcatgccactactctacatacagtggccctctggccacattccatcatgacttctcataaactctaaacggaaatccgcaaacaaaacctaataatttcgcttcaacaagctctcagcaaacccactacagatgtgagtttactacacaagggaaagactccacactggggttgtaagacacctgctagccactcaatgacggcttaaaagatttagaggaattggagccccattagtgtgggctaacctattggtgtgggctgcctgtgtggccacacattgcagtatttaagagaaaagataagagacactaaattacagttgatttaatgagaagaatgtgtgaaggctaaaagtgaccctaaagttctgaatgactcagaagaaaacagagactatgaggaccaaggtaagtatggaaatctgagccaatccagcctttagattttaaaatagtatccatctaaactgtgctcaagaaagcaagtttaagaaggactgcttaccccaaggtatagaaagaagttaggttataggcaatggattaaattattatgtccaaaaccattataatttctggatgagggtctggtgagatggttcagtgggtaagagcactgactgctcttctgaaggtcctgagttcaaatcccaacaaccacatggtggctcacaatcacctgtagtgagatctgacgccctcttctggtgtgtctgaagacagctacagtgtacttatttataataataagtaaatctctaggctggaacaagcagggactgagtgaatggagttgaccagagtggacggggcctaccagggcaagtggggtagagcaagggggtttggctgaagggagcaaaggtccgaaattcaattccaacaaccagatgaaggctcacgaccatctgtacagctacagtgtgtactcatatacataaaataaataaataaatctttaaaaaataatttctggatgaatagcatttgtcaagctatgtctttccacattccagtgttgaaatagccagagctacacctttctgccttctctttttttctacatgctagaaaaaatgtcagagttttttccctaggattctccccttatcctctaataaattaggtcacctcaccaggaattttggacgtgctgggtggattttcccaaataaagacatcaccatggtcagttggcagtatcagtgatagaactgaggtccccagaagccagagccacggagggaagcagcattgcttggtgtcagtcacccagcagacctggctttcagtggctgctctctcctttctccctgtgggcatttttttaaagacaagtttctttacatcccagacctcagtttccccaactgtcaaagagaaacagtagtgcattctggggtttcgataaagcatgtatggaaaaaagcattcactaattttatttgaggagctgggggagatggctcagccaagcatagcacctactgcatcttcatgaggaattccccagaagccatggctgctaagatggcttggccaatataggagtttcctaggtcccacgtggtaaaaggaaagaaccaattcccacaggcaccgcgacatgagtgcctataacttctcaacacatacaataaataaacagtgttaaatgtatcttatttccatcaaatttgataccaaccaacgccatgcatttactcactagaaggtgtttcatgttctgaactctagatgcgctaagtaaaatgccccacccagttctgaaaagtcctatgtctgatcatctattcaccactcctgcttatgcccgccctggtctccttccttttcattgtatttactctgcttcagacactgcctagggtcaagaaaatataaaggtctaattatttgctttctcccctaaaccctcatgaagaagtgctcgtaatatgtttcttgtgaacttgtggtctcctctttaaatgtgagtctaaaataagtgtgtttgtcgagacatctttgggaaaggacttctttgccgctccctctcacggtctctctccctagccattagcttcaggttctcggctcttcttcgctctcccttctttcccaggacaacttactcactcactttgacttgtttcagtcgcttacaacctgtcttttcttcaaagcagatagagagctgcagccgcagccttgggactcctaaatccctgttctgagaaattgccagaatggggctgaattgcttcctcagccacttgtccagcccagaggcatctgagcttttctcactgccctcagtatgtcatcgcacaaaagaccaagccttcccttaaatacgaatggagacctggcttttgttactcctcattttctggatcaaaatgcagaagttcaaattttgcatttggtggtcttttaagtctagtttagaatttgtggatcaccatatataatctatgtaggaggaaatggaggtaaagaaaagtcttgagaactcctgttccttgggattctattctaagaaacacccaaataaattgaacacccacttgtttgtcttacgagttttctaaatattctttttttccaagccactattccttaatacacatttctggatggccccatcatttggaatcaatggccctatctgatgttaaagatcccaggcagatcccacatgaaattcttttatttgttcatatcttacaggcttaatatcaactcaaaaaataatgagaagcttatgcacattatggaagacagtctatcaacttaaacttactcgtctggtctgctagtgaaaaatggcaatggctaggagttgagacacaattaacagctgatggtttctaaagaggaaaattcattttcttttaaagttgtggaccctgatggattgtccatgccccagtggaaggccccacactcatgagtatatgagaaattggacttgtgaattaacatcatcatcattacgattattattattattaattattattattattattattattatttaaaaggcaacatgaagttgggagggagtcaggagatagggaataaatctaggaggagttgagggaagagctaaggttgagtgttgtcaaaatatattgtaagagattcaaataattaataaaatattagtgtttttaaaagaacttatctttgaagaggtaagaagtccccagaggaattctcagactgggactgatgcccttctctgctagagaggggactggaaagccaagaagaaggagaggagaaaggggaaaccaggaagaagaattcacagaaaacacaatttccccagttctattaggattctcctaaaccaagcatcagtccttggaactttagcttgccaagaagggttaaagagacaagagagaggtaagaccaaagaaaacaggacatcattgtaactcgggccaaagagttcctttgcaagtgtagagaacattgtttttcaatctttattcccaccctcacctctcttggtcatctgttgtatgctaggttcattagcctagaaaccttgtcagatgataccttaacaatggattagggactagatgccaccagtgtgggatacctgaattaaacgtgaaaagcaaaagagaaagatgccacgatatcccaggtcattcatgacaaggacagtcactttgccagtgactcctgcaactcctcagaatcacacaccagcttcactgtagtccttcacataccagtccctgaataaggcttttcttccttccccccctccctagacttccatgggtttcctaaggttcaaatacctagtaaactataccctgttcaaaacatctatggtggcttctgtcagtctgaacatattcatctattccatgcctctcaagggcaccaggggtattgaaaactgttatggcccatattcttgggttcttgggacattctccccaatgatgtataatttcaggaatttactttgatatttaagtaatcattgaagtgagaagacatcaaaggaggaggatgacttactgggaagagaaggacttcagtaggaggaaaatgtaggaaacttccaaagaatatgatgacattataggagaaagagcactttaaatcaacatacgagctaaaacacacatgttagagaaaatacctcttgaagaaggctactttgcatcacattcttggcactgaaggggatggcagtaccaacctctgtgccttggtgaacagatcggagataccacaggcctttctgtcattgaatctgtgtagtcaactttctcctgtggccctgttccagaagggatttaactcgcttctcatcctttcagataagctcaaaagcacaagggattttaggtggcaaagccacatccgacaggttgaaagtcggtgcattctctagtaatcatgcaggcagggtttaattaaatgagcatttccatgcacagtgcatctgatctggcatcctgccacatcctccattgcagggaagataccaagtcagtcagttaggtactctaccctacatgcttgcaataatgcctatatatgcttgcaataatgcatatgtatatatatataatatacatatatatagtatactatactatatattatatataatatacatatatatcatatatgtatattatatatattatatatatatgcatatatatatatgtcaaaaagtcagtggatagctgggtagtggaagagtagtcaggagcacatgcagcacagagcttatagtgtataagacagatgtcatttatcagaggttgctgatatatgaaaacctgtagaacagagcttaaagcatatgaaatacatacagatgttaactgtgtaaatttggccaatttattttgtctctgattccttaggttctatcagaaaattgagaacaataattagacttcctttgtagggtttctaggactagggggagaagatcaagggcacacactggaaggcagagcactcaacagggcgccctgcacagagcgagctccccataaataccgtctattagcattgactgtgctcagtagatctgaatagtctaaaatatgctcaggctatgcatctagatggagtctaattcaatctttcctgaatggttcagagaacactaaagtacttcggcagggtcatttaccatagaaattgcatctccagttcattagccagaatggtgggagcagggtgcccctgcttgtcctaatgcaggccctcgctgactcgagggagttggctagaaacaaacaaggcttggaccacatggcagccttccaaccagagttgctatctgggttaggattacaagattagcacaaggagcacagagccaacggaataatacattctgataattaaaaaaaaaagaaagaaaaagaaactgacaccatagcccacgaaattttaccctttacatgaaatgcaaactggtgtgagcgtaaagcaccgcacagaggctaaaagctgacggaaggcaaatgacagttattagtgctaatgtatggaggcagagggatgcctggtgtgaagcccgtggcacccatggtaagccctgttttatttaacatcttagttaatgacctggaagagagcaaaacagaagactgaagccagatgctgaaatggatatctgttagctgtgtctgccgagtatcacacctcctgtgggcgtccagttggacttgggcgagggactcttcctctgtggataaaaatctacataggattgtcaaacaagatgtccaattcctattgctttgcagaggatgacaaagtgacacaagctgggccaaaaagttacgctagccccaaaatttggatcttaagcacacattcacttaagagtacttccacacatcaatcttaaaccaatgctatctttgaagaaataaagtctttagaagccattctgtttggcaggcaataaatgcataaatgcataaatgcataaataaataaataaataaataaatgccaactctaatagagtcatagcttttaaacctatgtaagtatatttatgtacgcctaagaaattctgagaccactcttctgactttaaaattagagtgtggtggtttgaataaaaatggctcccgtgggcccatagagagtggcactattaggaggtgtggcctagttggagaaggtgtgatagggttggaggaagtgtgtcactaggggaagactttgaggtttcagatgctcgagtcaagcccagtgtctcatgctctcttcctgctgtctgtcaaatcagaaacagaacactcagctacctctccagcgccatgtctgcctgcaccctgccatgcttcccaccatgctgatactgcactagacctttgaacctgtaagccagccccaattaaatgttttcctttattagagttgctgtggtcgtggtgtctcttcacagtaatgaaaaacctaactaagacagagaaacactatatacaaagaaaaccatttttttaaaaaaaaatcagtatttagattcaacttgaatagcattgttatgggcattgtcagggtgtgtgtgtggcaggaataaggattttcatagttacacaatagagttgatgtcaagacatcagagaatccagaagaggattgcaatgagctaagacaccttttttaagcactgtattttttaggtggagtctcactgtattgcccaactcatcccccactccttggatcagcttcctaagaggatgggactataggtgcacatcagttggaagtacctttaagagttatttaacttctctgttgcataaaatataaaacatcagacatcaaccagagacttgagttctaagtgacctctacagtacatagcctgagttatgggccatgtgttttctttaaagtaaaagtcacaagagagtaagtctaatggagtttggaggaatgtagtaaagttgagtcaggttatccaaggaggtgaaatgaatgcttgaaacgcactggtctcgattccagtagtcctgccctcttgagaggaatgtaggttgaaggatgaagatctgctctgagggctgaagacagctatttacaaaactctcagctactccagtttaaaagaagacaggaagactaaagttgagggaggccaacttccactcggcctcatggggtgttatcactgaacaaatgtccagcctctgggataacttactctactttgggagccatgtggagaaaactactttctaacaatgacaatggtcattctttttcaggaagaatttggaaataactttttccccgtattgaatagaataaatatctacctcctagctttctagataacagaaccctatccctgctcctccacactcactctatataagcagtacccatgggggaaccagtctgtgctgcagaatggcgagtgctttggaaagacctgaagtacccatccatcgcacactggagaaggggtaaacagcaacaggtacatcacatactaaaagagctacctagaatcataccaatcatgtctaacagaaaacaactggcagctacaaatggagacctcgagagcttaatggagagattatttaaatggatagaagtaatttgggtgaaaccaagagggagaaatgaaacactgtagacaagccaatgtcagcgctcctagcaccccggtccctgtgttaatgacttctcctcggtgctctatgatcaaatacctgacacaggaaagttaaaaagggaagttttattcttgaatcatggtttaaagagatacagttcttcatagccaggaagctgaggcagctggccggtcacattgggcccacaggcccacaatcaagaaggaaaaagagagagagagagagagagagagagagagagagagagagagagagagagagagagagagagagagagagagagagagagagagagagagagagagagagagagagattcacgcatgcgtacggctctccttttgcttccatctgggacccgagcccagggccttgtgctcctcactcggcgagggtctttcttgttcatttaaaccttctagaaacacactcataaagatacccagacatgcatacatgcatgcacggcgatcctaaatcttgtcaggttggcaaacacgattagttcccttcacaactccccaatggaggaaaggtgagggagctgaaagggtcggatctgcgagagggatcatcccaaaggcaccgtgactgttgggaggcaaagttaaacatcccctaccccacagcacggtagagatgcagggaactgagggaacggacttgcagccttgtctgcctgactgctctgtgcagccaggcattcctctggctagttctagccatgtgagttgggagagtgctgacgtaagctggagagttcagtctcaaaatggagataacacatgaggaaggggaaagagaactgactgtccattcacatctctcacaccacagccaatcttcacagtcctctaaatacgtggacttagttcagttttgtattgagttttgggtgcccggggttgaacttagtgtggcgctcctgctagacgagtacactattactaatcttttgtctccagacctttaaaaaacaaaatttaaagtttgagtcagagtcttaccaagtttccaaggcaggccttgaacttgtaatcttcctgctgggtagctgaagacttgaattttcatttctgagtaagatctgtcactctcatgaagcatcaggctacattttccttaatttttatacaactagggttcaaaagaggtagtgtcctatttcccaccatttactcacagtcataaacatggaacaaaccttcctaatgatgtaatcatacaaggaatggcaggagtgctaactgcccccaaatatgtcaaaggacagaggaagtctgtgccatagagactgctgggtagaacgcaagacttccttaaacatacacttgttgcaaaaactgcccctatacctagaaggatttattttaatggctgaaatagtgggggtacttgtgattcagagactgacctctactttgcctgactccaccttggacccagctcctagcactgactaagcccagggcctcctgtagaagtttgacccaggactctggtttctacaaagtcctgttatatagagcaggacggagcaaggagaacatcaagaaaccagggagccatttaggacttggaagaggctctaacaaatctgcgctgttatgtcatgaaagaactgcagaaagtaggtcagctgtcagaaacccaagatgtttgctgacagcctcttcaaaggctggctgcctctgatttccaccattttgaaaaggaccatgtgtctggctcagcaggtcagacccctcttccctctactgtgccttttgctgatggtggcacccagagatgccaagacattcctctcttctgcattagcatcacactggtgggaagaaccattaacattctgcaggtgcctctcagcctgaaaagcaactcactcccctaatcttgtgccaccttttattcctgaccattaaagtgcaagcattctgaaacaattttcaaagcccttaaagctattgataatgagattctgatgagctggttcaaagtcagcactaatgacctgttgatggtcctaacgactcttacaatacatactgtgaatgacctattgttgaaatggagagtgactggcttttgcactagcccattaactcttctcggctcctcattctttctagaccaaaatattttcttcccctctgtttgaaaagttaataggtaaagaaaatgagagaggggcacaaaagaatacatattggtgactgacagccagaagagacaacggaaaaggcaagaatgcacaggagacaaaggccaaggcctgcttatacaatgttatagtttagaaggtgataaatccccgcaggagtgcacacagcagctggacagggatggacagcatgcaaattcaggcaatgagaaatgtggataggagacaaaaccagtccagggaacttctgggcctctcaccatgaaggagacattcttacatattcagaaatgcacattcagtttcttttgaaatgcaacatcggcacttatggatgtatattacctccattcatcttcccgtgcatattgcttaatcctgggacaactgacacttgtctgtttgctatgcctttaagctgctagccacaagcacagagagaattcctttcctctatgggggcaaaaatggttaccgtcttgggtagatgaaccctctccatttcacagcctgtattcagagaccacccaagaaggacacatcctgcttcatctccttccagacactaaatactttgccccacaggcagtggttagatccgagcagggtaaaagctccagcgtttaacagcagaaaaacaaagtctatgcgtcgacagtcaaagtctctgcctcctacttgactgcctgtattgtattttttttttgttatgtgagtgtgtatatgtatacacatgcacatatatgttcatgcatgagaaggccagaggccaacataaagcattgttcctcagatgtcacccatcttgtattttggtgacaagtgtctcactgccctggaactcatcacgtagactctgctagctacccaacaaaccccaaagaccctcctgtctctgccttcctagcacaagtattacaaatgcagaccttattgcctgttgtggtgttgttattgttgttttaagtggcttctagggatcaaactgaggtcctaatatctccatagtaagcacttttatgactgggtgttttcccatggatatatggaaattccaggatatgtagctgaaagcatctgaatgagagataaaataagagaaaatatatcacagcgtgttacaaaccaccaagcctggaagcctgatagaggatgttgactctggatcctgaagagaaaccagagaaccatcaggaccagaaaggctggatccatcagtgacctcagagtttgatatggagacacactctagaaggttttgttcttttaagatggggcatctgatctttcaccctaacagtatcatttcctagaaagctaagaaaccttcaaggagaattgctgtctggggtttaattctgtacctcaaggaagcctttgcaacagagctggtatttttcctgtgaagtgtcaaatagttactattctgatctctgtgggccatgtctctatgtcagatatgcagctttgtctttagaactcaaaagccaccacagacaacacgtcaatggatgaatgttgttgtgtacgaataaaactttattggcaaaaacaaacatcaaccatgtctgcctaaaaggaactgttggccaactcctgccctagggagtaaggatattcctatgatccaacagccacacctgactagggtttatactaagaaagcagataccatgggcataaaaactatataatttagtttaaaaaacatctgaatataataaaatgttggaagaaatgaatctgtgtctgtggctacttctaaaaaggcaatgtaaaccagatgaggaggtacatttctgtgacccctgcactaggatgactgaggtaagaagatcgtgagtttgaggccagtcagagctatgtaaaacaaagttctaccaaaactacaaaggcggcggggctcaaaagaagacctctattttaagcaattacattctggttgtaatataagatctgtggttaaatgagattatgtaagaaaatatacagaagataaagatgcagttgtaatacataaaaacaggacagttacaaaaatatagagataaacttgtacggtgagtaaccagagcttgggaaaatggttaaaaataaaaaatttgttcaaggtatgttcaaaggaaaatgacccaggaagtgatagaaccagcttgtgtgatgatgtaaacgaaagctaacagggaagacagacggtcctggctttcatctgtcccttcatctccttcaccaaagaggctgatctgaaaactacaggggaagggagtcggggctatgatgacatcgaatcttctatggtaaatgaacagtgaagatgtggtcacctcgacaattaactgcactgtcccaagacagtgatcaccaccagccacagtagccactgtttactgagaacttaaagtcaaccaggcagtgtgattaaaccctcaataagtgtgaaccagttgagtcctcagaacacggcacatggaatcatttgcattttcccattttatgaatagacaaagaattaaaatcttgtaaggataaagctcagccttgaactcaaggatgtgaagtacaaatgtcttagtgtgttcgtgtgtgtgtgtgtgtgtgtatgtgtgttcatatgcatgtttatacatatgtgtgtgtgcatgttactatttgtgtaggtgcacatgtgtgtgagcatatgatgaggctaaggacaacctcaagtattgttcaggcactgtaacctggagtgtgtgtgtgagagagggggcagaggggaggaagagggcgagggggagacagagaaagagacagagagaggtagagctttcattggctttgaagctaccaagtagtctaggctggctgccactgagccccagagatctccctgtatccaccaccccagcattgggttataagcatacaccaacaagcctggtttcttcatgtgagttttaggattgaagtcaggtcttcatgctttcaaggcaggcatttgactcactaagccaccttcctagactcaaagccttacttttagacatattaatataacagcactttcaaggctgaggcacagggattgtaagtttgaatctggcctaggctacatgtctgtgaatacatatatgtttgcatattaaatgcatataatctaaaggtttgaccaatagtcacaattaacacttaagaaatcaaactgaatttaaaagtgaactaaacgaaatgaactagaatttgctgtcatttaaaaaaaaaaagtaaagcaaagagaattttcaatgaccagttctaatttgtattcattcatgtgaaatccctaagaagtgattggttgtggttagttttttaaaatatagaaagatgtgactatcaggaattcctgatcaagctcccatctaccacatgaagcctccctgaagaacactgagaagcccagtagatgcccggtgattacaagtgcttgctgctcctgcacagggcctgagttcagtttccagcactcaggatagggagctcacagctgcctgtaactcctgctccaggatatcctataccaccctcttctgggctctgtgggcactgcagtcatattgcataccctcacaaacacacacacaccacatacactcactcacacacacacacacaatgggattgttggactgtaagttagagaatatgcatatgtgactcacagtggggcatctgactacgtttcccatggattcatatgaacctatggcagtgtggcgagcagaataattgtgcaggaaaagagactcatgggtctctaaaggtcattcagatggagcctccaataaaatgttataggcagatccccaaaaacaggactgcccctgccccaagttttgagccagttacaacaagcccttcagccttgtgtgcgttcccattgttgagtaggaagccatgtatacacatgtgtatcataatttataatttctgcccacccacttccacaaaatatgtgaagcagttaacaagtctattaattaatgacttggatgatggaggtattgggggggtgcttataacggtgacatcaatcccagaatgacaggacatggacccaaaatagccaagtcaatgatgacatcattaagtccaaactagacagatcacccatctctacaacaacaggatgaaaaagatttgagatagtccacttgttaaggctctgaggcttgtgggtgatgacagtgttaatcagttcaatgtgtctttcagaagaggaagtgtcttaggctcccattacagacatatggatcttagattcatttttttctggtgtattacaagtgacacaactcatacaccgattgccacaggagtggtatgctcaactctgggaaacatctagaaatacaagaggtcattcagaaataggttgtcgagaaaaagaagtgaacagaaaaacattcagggctagagccgtcacccagtggggcaggacttgtatggcacgtgatcaaccatcaacatcacagacattaatgaaattataccctgaaccctgttgctgtgggcacccctctttcatggtcttctagaattgttatacaaaggtcaccaatgactctggatcacaaggtcagtcagggggcctttccaccctcctcctccacccatagaccttctatggccttatttgtaagtttgatggtgagttccaatgataccagagcatcctggtttcttctccgttcatcggtcattctcatcagccccgcctccctctcctaaatctgcaagcagtggaatcccccacagctcaccaggtgaataatttctagagcttttcaaacctgaaatgatcacattcagatccatcttgaaattccaccttagcggtggctcttacacatcttacacatagatctctcatcccataagtctcccaatctcaaaccactggtgtatttctaagtccaaaagagtggaaactcatgcaacatcccgaaccttccctgtatcagctccagggaagctccagggtgtccttgctcccaagcaccctattccaactcatagtggcacccatgtcctctctttccttctctctatctgcatgcaatcacacacatgtgaagtctaataggtggtaaatcttaatctcaaaacacaaactccctacattcatatctgcccccaatctacctctcacctggactatgaaatagccacttggctatttcttgcccctacagactagcaacagcttagttagtttttctaagtaggagaatatgcttctaggcttgatcccacttagcacaaaactccaagctttctaccagcctaggtccccctaccccaagtctctgtcttgttccctgacttgttgcactcttgtcacatgaccctctctgtgatgttttatatatgctcagcactgggagtggcagtattagaaggtatggtctgttggagtaggagtatgaccttcttggagtagatatgtcatttatgtgtgggctttataagacccttatcctagctgcctgaaagccagtattctgctagcagccttcagataaagatgtaaaactctgagctctgcctgcatcatgcctgcctggatgctgccatgctcctgccttgatcataatggactgaatctctgaacctgtaagccagtcccaattaaatgttgcccttataagagttgccttggtcatggtgtctgttcgcagcagaaaaaccctaaaagacattctcaaagcccctgaacacaccaaacttgctcccgtcttcaagcattccccagggcttcggatccccttgtggcatgtactttttaatccatcagatatctacacaaatgccacctcctcctagagagcatcctagataacatcacctgaaaagactcctccctcttttatttcacttgagcaactttctaacagcaaattgtgttaatttctgtcagatctgcagcagcatgtctcttgtctgttttccaccccactaagcagcagtaaacggctgcttaatgcacggtgggggatcacccagcacacagattcaaagatcaaattcatttatctgattccttcctagcatttcccaaacctaaacgctgtagcaactgcttcccttattgggttttctactctctaaaatcctctcgggaatctttgtgattatgcttattctagaacacagcctatcatccaacagccatttggtgtttattgaaaggaactgagtttggaatgacgcctatctcgattccatctaaaacagaattctcggttaccactatcgcgttgatagcgatcttgccatctctgagagtattcacgtgtagattcagtgggtaagatacaaagggtgtaagggaccggccggtgtgtcagaggaaagaagggactagatactgtctgacactcaggatgtcaccccttcatcctctgtaggatgcagtgaggtggcagagaatatgggagctgtagccagttgtggttatcaggtgagtgagcgctgagaaatacgcatagcaaaaggtaggaatccgctgatgaaagactatggagagggaagatagtaggttacaagggaaagatgggttcggagagactttggaggttatttaagcatgtttggaagcagccaaagaaaggacgctggaagaaagagtcaagcgcaaagtgttggaaagtgtacctaaggccctccggccgagtactgctgcgcatgcgtcacccacagccgctcgtagaatctggccaggctctgagacacagaatctgttagaatctgttagctaaggaagagatgggatgtgcaagaagtgatctctaagaaagttttgtttgtttgttgtcctagttaggtttaatagcacttattgttttgatgtaatgttttgttattattatttgtttacgatgggcgcctggcagaactgctctgagagaaagagctccctttctaggtcgcatgccctaagtttcttctagaaagagtaaaactacctcggagaaatttctagaactaggaaggagtcctacataacattgagtccaaagccacggtaattctgactttagacccagcagggaaactccggatggggtaggatgtgatctccccttggaccgcttctcccattggggagagaaggaagttggctacggctcctactaggaagcaattgctccgtggctgcagtcctcaccaggctcacacaacacactgccccctctccgtgcagaggcgataaaggctcccagaggctgatactcgctggcctattcatcatcagctcatattgagtccctgaattcttcccatatatctgcaaacggtatgctcatcagcccctgctccactgggcccttgtgagtgggccgttacatccttgccagaccctggctacaacactgacaaagacccgaaaaaatgaatcccttacctggggcagacctttccatcatccactcatctgaatgggactgctatatgccacttttattggtcattacgcaaactacagagcccacagattagaactaacaaagtgatttcatttctagcaacttatctgttggatcacccatgacacactagatgtcaactggctatagcctcacctgaatgtccttgtgcttacagttctaacctggctccactgctgaccttacttcctcaaggccacagtgagggctggcaaatcgtagacttgggctatctctatgtagctctgccttcagttcctacagtactttacgttcttgtaataaataaataaataaataaaaaagcatctgccccctggctgctactacctctaaaggaagacttccaaatactaggtaactcagctaagactcatagacaagtttctgactctgcagagaatttgcaaagcaaatcaagaaagtgaaatcgagttctatggtggaaattcactgtaggaactgaaggaaaagctacatagagatagcccacgtctacaatttgccagccctcactgtgaagcagcctccctgagccagatcctctagtttagacaggacatggctccttgaatgtccaagctgagctccaccttctactatctcccaaatggggcttaaatttcactgaaatgagcatttcagaggggtcaaacatattcaaagcacaatggccttgtgttctttctttgccagtgtctaaacctccccagccacctctttctgtccgttcttttcccaaattcagaaattacacactaattaagtggtcagaaatcatgctttattaatttgtttactcccataaactatctgaaaggagattgggtaatctacttttcctgtgtattatttcattttctcaaataatccgtaagattggattgtcccattttaggatcagtgaaatcaaggctcagaacagttaagtacttaatgcaaggttacaggatattttaactcagcttagaacctgagtgtgtttatctgcaactccatggccttcctttaccaatgcgtctcttcccctgtgcccagattaacagtctcttccatgggacgtcagtaaaacaaacaggacatctcagctgtaagccacagcttcatcaaccctaggacacgggctgagttctaaacccagacttttgcttgctgatccacacacacaggagcaacgcagacctcacaccacctacagaaagcactgtctcagatctgctgtgaccgaagcctgtatacctgtgcatctccacttctgatcacttgccacagtcagaacagtatgtgctctggaattccactctcttgggctcaagagttaaacaaacaagcactgagcagaggctgaccctcaacttctacttgcattttctcttaggaagagagagagagagagagagagagagagagagagagagagagagagagagagagagagagagagagagagaagaagaagaagaagaagaagaagaagaagaagaagaggaggaggaggaggaggaggaggaggaggagaagaagaagaagaagaagaagaagaagaagaagaagaagaagaagaagaagaagaagaagaagaagaagaagaagaggaagaggaagaggaagaggaagaggaagaggaagaggaagaggaagaggaagaggaagaggaagaaggagggagggaggggaggaaggaaggaaggaaggaaggaaggaaggaaggaaggaaggaaggaaggaaggaaggaaggaaggaaggaagaaaaagatatctaagaatgaagaggcaggaagcccttgcccttccagacagatgacaaaagaaacaggaagtctgggtgaaagatggaaacgtaagctagagttggagtttaaagagttgcagctggttgaccaagcttagtctacctctgctatccaaagtaccagcacttgttacagtgagaacgtctatcagacacatcctggatatgaataataattgttcttatactacgacagaactcactcaaaatatttgatttcacatcagccgcagagcatgagataaatgcatcttttgaaggtcccacatcaataagcatttgtgggatactttatctcttcctaggagagcactctatcagtggcaaacatgacatcgaaggctagtcacagagcactagtttctggcaagtcaggaaagaaaagcatggcctcttgggacaaactggctgaatttgagttcagtctcgaatattcgctaaatttttagccattgagttagtcacctaggacagctagttgccaacctatgataactatcttatttattccatggtattgtgagagttaagaaatgctattcattaagtcaatagagaagcatcttgcacgaagtattactaaatacaaaaccctgtatcgagggcaagatatctactttctgccttgatagaatagctggtttcatagcagcccttctattaggagcaagtgtaagtcagaacagactacgtaggggaaccatcaccaggcagcaaacaacatagagcataagacttggagtcctgcgaaaaatgaaactcatgagctaagcctctgaccactctggacctaggcctagacacgatttcctggctggaatacagtaaatcagagtccagcacagcacaacacagcagccccactctgctgaggaggcagaggtcagagttgctggcatctagggaggacaagacctaagaaatacaaatggtaaataaatatttgaaaagtattctacatccttacctctgtgagaaatgcccattagattgcttgagattctatctcaccccagatagaatatcataaaactaaaagctgaactcccaggtcatctggctctactacatccagggaaacacccaatggactcaaagtcaacaaaccacagagaaacgtactcctccatgtctagtaccacactgtttgcaatagctaagcccagactaggtgtccgacagcagatgaataaagaaaacatagtatacacacatacacacacacacacacaaaacattttagccacaaagaaaaatgaaatcatgacatctgtgggataggtagagttgggagtcaatgtgttaagtgaaacaactccaattcagaaaagccaacatcacgtgttagctttcagatttgtgtgtaatggcgagaagaggaaagggggaaaggaagcataagaaagaagaagtacttcaagtggaagaggaaagggaagggggggaatggaatacacgagacaccaaagcaagaactgtttccatggagaagggggaccagcaagaagggagcatggcaatggaagagaatggtgggagagggggtgggtaaagacaaagtattatggcatatatgtatgaaaatgtcatgggggagcccattgctttgtgaattgaattaaaaattgaaattttaaaaagttaagggaacatttaaaccatgataaaccctgctgctgcagcacctgaggggtgtgcacaaagaggagtcacctaaatgagttctgtttaagatgtgatcaaggccagacacctaagatttccctgaccatggccagtctatccttgaatgtaaagcacagctctgcctctcgttggtttccagcccatccggatcagattgattgatcttctttcacattgtgtgattgatatctttagcatcaatctgagttgctagaaaggctaacccttaggactaaggactataaccaaaaggaagatatactccagtttatccaaagaaacacaaaatccaaactccgagagaagccacaagtgtttttccagtatgtatgaagctctgggctccagcacagcatcccataaagcaggtggtttgtatctgtaattctggctaggagaggaagcatcgggagactcagaagttcaagatcaccctcagctaacattgtgagttagaggttagccaggaccacatgagaccctgtctcagccatgggagtcagagattagagatttcagtccacaaaactaaagagaatcatggtttgcactttccataaataggaaatagtgaagaataaaactatggccaagcaagttcaagatgattatacagcatttaaactgtaagataaattagaaatagatatttcccatataaagcaacagagttgctacattttaaattctctactttatccattttcccagcattcagttgaaaagtaacttacaaagaaaatgaaatccaggttttcatttcacctatgaagattatgaaactattagaagctgtcacaggcaagtgtttggaagtagaggaaaatgtgaccccaatgagtgagcaaagaaaaggtttcaataaaaaaaaacaaatttcacaggggaagatgaaaatacagtctcagacattcataaaaggtacaagaaatgcaaattttaaaaaacactctgtacgcttaacagcaaattggagatgacagagttggtgaactcacagacagattaataatatcattgatctattctctcgtgttgtttgccttggcgctctgcctagagaattttttgactgcagtaaaaagacccagtgcgcaagcacagctcagaaatgggatggggatgacgaaaaatgggactgccatacacttataacggatgttccaaaaatggaggatgattaaagcaaaaggagacacgtgaagaaattacaacccagaacatctcacatgcagtgcgaaacacaagacttaaaggtccaaggagcttacatcatgaaatcttgaaggccgatcagcccgaggctcagagaggtagccagcatagacctaatgatgcagctaagggtctagctcagggtaaagcaaggaaaaaaccaaaacagaacaagaaaaggaaaatcaaatacagggaaccaaagataagactcaatgcggacataggataggaaggtggctcagtggggaaagcattttgtcacagcataaagacctgacccacagcccacatataaactgggtgtggtagtgcctgtctggaatcccagcatgtctacagggagaagggaggcagaaacaggagaatgcccaggcactcacaggccagctagctgctgttcactggaccaacaagacaccatgtcccaagtgagatacaaggtgaagaccatccactgaagctgtgctctgatgtgtgtctatgtgtagctgcactcacagggatagacaaacacgtacaggtacatacacgcacataccacaatgataagatgaaaatgaatgctgaccaaaaacagtgggatcacatacctgtaaagtgctaaaaaaaaaaaaaattctaagataaataaaagtttagtgaaagaatgaccttcagagtagagtgaacaatgccacatgatgtatagacccagctctgccagaagaaataaagaacacggaagtgtaacatgtaggagtaagtagcaaggttcttgccgtcattctcttcatgattcacataagacaaagtacaggacacttacagcatccatctctgtaaacaagaggacagtcacgcaaagaactaaatgctcagctcagggcagttgcaacggtaggtgcatttactaaatttgtgaagaagacgtcggaaacaagagtggaagttaggaagtggccagaaatcagaagtgggacacaaaaagtatgtagagtcacatataaagggtaaacagataaaaagttaagtctaaatgtattgcccttatgaaagcatacctttagccaatatatatagatagatagattgatatattgattccttgtgttatatatatatatatatatatatatatatatatatatatatctttaacacaaggaaatgaaatagaagtactataaataatactttagatagaaattatattttattaacttaaaagataaaaacaagaggagcaacagagataaagtcatcataagacatctcaaggttcccaccctagtgaagagctacaacaattatcgactactaagactactaagtctgccttcctcagggatgagtgcacacagttctcccacaccagtggtcagccctaaacatataggagcaccaaacggactcagcgtgtggaatttacatatttataagttcacatatatcaataataatttaaaggctcatgcatttgagagggatctgggaaggtgagacatgagagacattggaaggagaagaggaagacaggaaatgaagtaatacggtaccgtatacaaaattctcaataagtaaataaaatcatgctttaaaagcacaagacaaaaaaatccacataataagacgatagacatcaaaccaaatatatcagaagctaaattatactataccgatcttccaattataggacagatgtcctgtagataaaaaacaattaaactctgtttaccaggaaaacgtttaaaataccaaggaatgaacagaagaacagaagacactctgtcagacagctgtataaaccagcaattcgactcccagacatttccagaaaaatatctgaaaatgaattacttgtagcatctaaaactagaaacaattcatctgtcataagcatcgtggtatatttataaagtcgatattcaataaccaaggatcacactacagtgcatgcagcaaaatggacaagccttgcaaacattttcccaaggggaagataaaactagactttaatggtatgtgctataatttgatttatatgaaattctagaattatcttgactgtgaggatacagaaccgctgatagttgcattgggccaggagctcaagagtgagctggatacaggggaccactctgaagggatgcagagggtgtggactactctaggggtatgccctgagtaggggaactgtctgaggagatatagaggctctgattagaatgatggccacagtggttacctgtcaaaaaaccattgaccagtacactaaaagcatgtgactttcattctatgtgaattttacttcaacaatgattatttaattcttcttaaatataaaagcaattaaactttctggccccatatcaaacatattcacctcatgtccacttgggaaagaaggaattgaattaattacctgccacagtagaacattaaaatgacagaactacttcagtgggctgtaactatccaatccccatctactctgaaggcatttgttaatggccagccaattccattcttgttacttttctgctttattgatcatcaacagagtttaactacctaaaagtctcatttctagaattctcttgtaggcccttggaagctcagaaacccatggtgtgttcctaatcctccacacaagaggacacaaaatatgagcacgggaagggtctaacgacctccgggctggccgcagcctcagtgtggaaactgggaatctactgtttgggtaggaaaccctcgagctttggttcagcatccattcccagtctccatgccaggctcaagctttggtggaaaagcctgttttctagcagtcagtttctcagttcctgacatatttacagtctcgccgttacaagcgaaccccagtcattgagagtcagccattcagaatggctcacctcttcacaactggatggcatcttcccaacagaatcctcagggacagtggtagagccatgcaaccggatgtcatggcatttacctcagatcactacaatttatagaagccgatggggaaacttcctcaccttcaaacagctctcttggcacagacagatgtgtgaataggttttctcctagccttcccttttaccctctagagagcccatcccttacacacacacacacacacacacacacacacacacacacacacacacacacacagcacagccattcctaatctctatgcagcctctatgcccccaactcgagtgaagtgactctctccataccttgcagagcttccagaccacatcacactaattctcttgctcctagctggccaccacatcattaacctctgaccttccactggtcctgtgtcctgcccaccatctctctcactttccctctacttcccgtgttttcctctactaagcattcctttctttacagctgccccactgtgggtaggactgtcgccagggagagtagacacacacatcaaagtgggcaagcagaagcaagggaggcaagcagggaattggcaccctaggtgattctcaaattaagctcagcagttaggaagaatgagatccaaacagtatttctagataatgggggttatcttatgtcagcgcctccccttattttagtggcttttgacacatcaccttcctacacttgggcctggtcaaaagcacaaactgcctgcacttaagaggctcagtttcaggttagggcaggctgcaaaatctgctgctgggaagaatctaggtgtgaactttatttcccttaacacatgacctctctgggtagtcctaggctgtcatggaacacactatgtggaccaaactggcttcgaaatcacaaagatcccccatgtctctgccacctgagtgttaggttaaatgtgtgtgccaccatggccagcttgatcttttaaaaatgtttaattacatgtgtgtgcacacaggtgtgtgtggacgctatcggtgtttgatcacctacaattacaggcatctgggagccacctgaaacaggtactgggaatcgaacccctgtcctcctggaagaatggtccatgctctgaagcactgaaccatctctccagcccaggtgtgcatttttgtttctaagtctaaggtataactcccttcagtaggctgaagactattaacccttggggacacatttatatttggcgacaatataggtaggacggttgctgagatgaagaggcatagccatacttacaggttgcccaccaggagatagtcatcatggcacagcatacagcattcacaaaaatacaaacgggcagagggaggttgctgcagatttccagcctgtaagacagctgtgagtcaaggactagcgtccctaaaccatccctgctgagtcttgtgtgcagactgcaacagctgaagtctgaactaaagccgacatggaatgctgaccaggtgagaatgtgaggccggctgtgactaattccctgccagctcatacagtacagcctctggtaagggctgtagcggaactgaaacgctagcatgttactgccctctcctgggcgagaggtcaaatccattcagacgtgtgagtcataactgaatcaagttcgtgagccccgaggtggtcagtctttaatccaatcttctacaaagtgttgggggaaaaaacagcttcccccatcttctccttgcaagccccctccctgcccacccccgtttgtgctcccccactcgcttctgccctcagtcttccctgatggacgtaaacagatgaggaaagagcttggaacttcctactggaaaagttgacaggatggatgtcagaactatagtcccaaacatcaaaacatcctgcagattcacctttcattgtctctcagcctgtaacagttcatctgtgtctccaaaataacaaacaaacaagaacaaaaacaaaaaatcccaatccgcatccaccgtataaaacagagcttgcagcccttgtacttgatgcttgaaaactcagcttttacaactaatggcacataactgagttgaagtcgtttgttttgttggttgttcttttatttaagagctagaccttcctgtcaaaatttgtccaaactcaattcgataggaagtaattatcttatgacttttaatggctataccaatagcactttacacagagacacatgagaatattacgcaaagaaaaaaaaatgaagcaaattaattaactgtgccctgatatgcctaagttagttagtttccattcttcatttcattcaaaatattaagatcaggcacaattttatataaattaaaggaaattggtgagaatttataacatggtgtctttcatagaaactataagcacttgaaaggactatcgtcctcagcaaatatttatccagtgcattaaccctggcaactgaacgcagttctattatatgtcttcctataaggctaaatcacaaagcatgctgagagccagtgtcagagtcaccttgctcagcccacactatcagcatcacactcctgactactctggtcattacagggatcctaccatcacatgtcactgaaaagcgtctaccttagtagcaggtagcgtaagattatgagggtgaaggggtgctgtggggaggcacctgactttctatcactctctgacagaacagtggccaccagaacatcgggatgactcatttcaacctgattggaactcacagggcaatttttcacttgatacttgtcctaggtaagggtagtattgctgtgatgaaacgccatgaccaaaagcaagttggggaggaaagggttcatttggcttacacttccacatcatagtccatctctaaaggaagtcagggcaggaactcaaacagggcagggacctggaggcagcagctgatacagaggccatgggggagtgctgcttactagcttgctcctcctggcttgatcagcaggctttcctatagatcccaggaccactaatccagggatgacatcacccaccatgggcttggacctcccatatcaatcagtaattaagccttccacttagatctcacagaggcattttctcaattgaggctccttgcattcagataactctagcttgtatcaatttaacataaaacaagccagtgtaatattttatttttatttatgtgtatctagttatttatttatatggggtttctttatttttgagataaggtcttttcagctatcctcagtggcttagagctgatggttaccagacctccaccttccaaatcctaaggttatataattaggctcttccatgcccagtttgggtacatcttatcactctactttttgaaatatggggaaaaagaagtgttcagaatgtaagtatttcacccaaagttgtgaaatccagagacgtgggataggattcagatgccagtgtgagctgtaaggccaggctgttatctgctgagccttcctcctctggtcattctttaaattagaatcaaccaatcaggcttgccatgcaaatcatctagaaatgaaaacaaagggcctttaagggggaatctgattatatgaaaggatcacctagtcagactatgctatgtccctactcaaaattccaagtcttgtcatggcccacaaagtcctccatgtgttagtgtgacctcctctaccctactcctggctcctctgtcagcacccctccacacacaatctccactcttgccaaggtatctttgcctgggttgtttccagtgtttgaggtgctcatgcccactatcaacataaaactcctcctcacatcacggagcccctctaatcaatgggaacagcctttccagacaagtctaagcctgaatctttcagccctgtcttatcctcacctgagtcaggtgtcctcacaagatgatggctctcacagaccattgtatcaccatctgactgtttgccatctctcctagagaggtgaaagctacagactggccatgaccttacctcatctgctcactgctggtactacaacagttgatagccataggagaccacaataaatatctgctgaattaggaatggatggaggacgtatccacacttcccacttttctgtaactttcatctgcaaaacagatctatgaaggaaaaccttagacttgtgtgcaaatgagcctactcattgcccatcttattcaatatctacacacagagacacacacacacacacacagtcttctgttgttctctaaaacctgaactctctgctccaaactcattcataagtgccttcagtctccccacatcagactgctgagggaaagtggttacttcaaggccactcttagtcacagaaccaccatttcactggcttaaccaaatgagcagcgttgcattgttacagatgggattcttgcccttgccccaagtcagtgctacaaacttctcatagaagacatattttccctctaattttcataactggattccagcatggctgtgttatagggagacagtaaaatttccttaagagaaagggcaacaatagcaccatgggtcctgagctctgtccattacacacctgtctcccttagtcctcccaactgtgcaactgtgcagagtggctttgacactcctcactctacaaatgatagcactggagtctcagaaaacttaaggatcattttatcccttatgagcagagaagtgaaatcacatctaacttgaatccaaagaaggaacatttcttatagtcttaggtaaatgtcaagtctgtcttctaatcaaactggatttgtttggttttgggtttggtttttgagggttttattttcccccatgaactaaccattaccctaagaacatggctgcattgtagttttgtttctcttgctgtgataaataccatgaacaaagtaatttgctgaatatgtgctgaaggaccatagtttatttcatcttacaattctcagatcacactctgtcactgagggaatttggggcagaaactcaaagcaggaacctggaggcagaaagtgaagcagaagccatggaggagagttgctttctggtttactctctctggattgctcttcttgctttcttatacaacccaaaaatacatgcccggaagtggtatcatccccagcgggctgaatcctcctacatcaatcattaatcaagagaatgccttatagacttgcctacaggccaatctggtggaaatattttcccaatttaagtttcacttcccagatgacattatcttgtggtaagttaacaaaaacaaaaacaaacaaacaaacaaaagtagaaatcagccataacggtgtgcaatctggaatacaagacttatgagaagaaaagttctcagtgttaatttttccagacctctggactcctggtcagactcatgtgtgtggtacctgtaacccacggagttctttgtcagtgttcacttcactgagcagacggctggctacacaaatacactgctttttagggtgtgtgtggtgtgtgtgtgtgtgtgtgtgtgtgtgttatgtgtgtatggtgtgcatgtatatgtgtgtgtgtatgacgtctgtgtgtgcactcatgtgcgataaagaataaaattattcagtttggccccctaggtcaaatagggtaataataattgactggaaatccaatgccttaaacaaggggtaagacagaagtctaacaacaaaacaaaataaatccacagggactactaagtaagtgcctggtactcctcttgtctgagctgccccatccattgagtatactgtttccatgacagcaggaagagacgagtgagaagtgatgggtagtaagcatccttaggagttgttacaataacttaacaaacctacacttcttccttaaggctgtttccactaccactgcaggttcctattacactactgcatgtggctgctagagcctggctctgcacaggtggccctggcaaagctcctcacatcacctgccaccactagcatctgcatcagatctgctagaacaagggaaggtcttaggcacacacaggcagcagattacaaactgcctgcttttctctctctagaattagcccctttacagagcccagcagacacaccaggacctgggtgcctgccccacagtggcatgtgctgtgcaggagccatcagagctatcctttctacttctgaggtggcagtagtaacaggacagttactaccactgaggtcacagatgtgggggaccagaagccactgggtgatttcagaaacacagaatgatccaatcacatttgggtattaaccatctaccattagagttaattctaagcaatgactatacagtcaccgtgcagggcagcctaggacaccaaacaccatattgtaataatgcagcagtacaaaggaagtgatgtccaagcctaattttggaatgaggacagtggcactgtgggacattctggaggatgctcaagacattgggttcaaatactggtcagtcaaaagtagaatcaaaaaaaggaggtttggaagttactttaggccaggtgtggtggctcttaatcccagcactcaggaggcagaaacaaacagaactcccccagttcaaggccaacctggtctacaatgaaagatccaggacaaccaaagctacatagagagcttatgtctcaaaacaaacaaacaaacaaacaaacaaaaaacttcctacatgtgtaggagtatcttaaaaaaataatttcaacacttcttctttttagctcaaaagttaccacacaggaagcatgatagaagccaagaggctgaggcaggggaattgtgagtttggagtcaggcttggctccatagtgagtctcagaccctcctgaggtatcaagtatgacctcatctcaattttttttttcagtcagtggccgttggtccaagagtctcccatctgacaacctgcatttcctactcacagactaaacccactggtgacaccaaacatggcaccatgacaaccatcattgccataccttgtatggtagagaatgaagcaaggattctccaatccacctccataatgctaaccatgaaatctacgctccctaggctgtatggtctgttccaaatagggaagcaacagttttcagttgaaagtctcattttactctcctctaggcatggtagcattgcttagagactacattttctgaaagcatagcctctccgtgaattcaaaagtcaagcagagcctatggaaatggctcagtcagtaaaatgcttgctacataagtgtgaggtcctgagttcaataccccagaatccatgcaataaaaatgaggtcacacctatgacctcagcactggggaggtagacccctgagactctgtggccagcctgtctacccctatggatccctgggactttgtgagcagcctatctacccctgtggctctatgggactctgtggccagcctttctaccccaaatgctgagttctagcttcagtgggaggtgctgtctcaaaatgattaaggaaaatatctgatgttaactaatctctggcttctgcacaccacaagtacacatgtacacacagtatgtacacatacatggcatgtgaacttcagttaactgtagaaaaacaatgactgagctttcatgaaaatgtaatcacagcagccctagctgtctattctcactagtgattgatggctgttgggtctccctggagacagcaaagccatcacctcagaggagaaagggagggggtgggagaggagcttgtgaggggcaactgggaggagcagggctgcaatcaggatgtaaagtgaataaataaattaatgaatgaaaaaaagatgaaagagggaagaaagaaagagaaggagggagggagaataaggaggggaagaggaaggagggataaatggagggagggagggagggagggagggagggagggagggagggagggagggagggagggagagagggagggaagaaagacaggaaggaaggaaggaaggaaggaaggaaggaaggaaggaaggaaggaaggaaggaaggaaggaaggaaggaaggaaggaaactctattaccaaattagcctcaaaggcaaaatcccttgagacctgtgtctactgggtcaaaggtgtacaaagaaaaggctcttgggtgaagagctcaccaaaacttgcagtcacaggagaaaagtgaattttagtaaaggttgtaagctggggtacactctatctacagacacacatgcagccttccttgcagacacacaccaacacagctctcactcctgagatcctcaaacagatgacggccatcagaactaagccaagggtcatggttgagggggcccttgcaggtcactgagtaaaagacttcagtaaattgatttgtttaagcactattagggaagaatgaggtggtatttaaaactagcacatagacaaatttaataccagatgccaaatagctgttgaatggacataaccaaaagaaagagaatgttctggggcaaatataaccacattgcctcacagagggaaaatgttttaaaactaaagaaagtctctgccagggggatccttggaggtgaagctctcccctttcataaggatcaatccaaccgtgccccacatgtttaaatgctgaactcaaaagcactcctccatgaaagaacagcaaagctttgttccccctccaggagaataaagatgctgcggtgtgtgccttgctgagacaacaccgtaaatagcaaaggagtcctacttttctttgtgttcagacaaagcacagccctactgattcggatcttgggggatatacagattcatttttgccagagtcatccggttctgctctgatgccaaagattttaacaccattggtggcagcagagccaacactggtgacttaacaaagactgttccaaagccacgtttctgaagggaagagacctggattcgacgaggagagcaactcctctggccacagcctttctgaaagcccaccctgcgtgggggttataccataagcacatcaaagatggtgcgtgtagatttagactcaaaacaccgtggtactcaggcatctggaacataaggaaggctgctgatgagcagctgggattctttttagagctactcatcctttggttcctttaactgatggggagaggcttaagacacccaggaccacacactgacctgagcaatgcagaccacagttttctttggaagaactaagtgctcaggaaaggagacttcaatgaactcactccttggagggcactctcagattacggctaccttccctccatctccagccccctcccgtcatgagttcagatctagtctccgcaactggtagtgtgccagtaaagtctatgtggtagggtcaatttgcgaagtccttacttcaaccctaagagccttctaaggtgcaaatcaggattaagtccattgaccaaagaacccaaggttctgaagggatggacaggagacactggttcatttcttaacctggacagcaagcaaacctcagctaggtaaaaagagttagcagagatatctctcaagaacccgactgccatggggaaatctccgagtgttcacagttgtctgtagcacctcctgagctcattccactctactgagatgggtggtaggaacttctcaccccttccctgcccccttaccaggggaagctgcagggttctgagcctcaggctgggctcagtaggaagcacaacaggatctcctgatgtcttagcgcttcatggacattctgcaatcaggctctgatcaagaagtttggatgtggggttcttgggagttacagggggcacattagccttgacatctagggaatcagatatccaataacagattcaagagtgacattttatctatgtgcatcttctactgttatagaataagatcacaaactaccaggtttcctccagcccagcgaatagacttacacactgcaacatgatacagactgaaggaaatcaacaagggtagctcatcaatagatgtttccaggctattctgctagaatacaaaagcctacagcagccaaagcaatcaaaagcagtatttattacgaactctctacatgaaaggcatatgattcttcttgtattaattgaggagaaactcaaaagacaacaacaaaaggctctaactggtaagaagtgggcacttgaattatctttgaccatgatgctgatttcaaaacccaaatggaaaatttgaaaagtggctggaggtaaaaaataggtgttgccatcttaaaggaatatattgatcagtttgtgatttctaatgaagctaaggggtggttttctggtgcagaagaaaatattacaattgtgtataagcagcagattgtgaacaaaaagcctcacacgccagaggcagttattaattaattaatgagattgttaaacaaccctgcatgttcaaagtaattattgaaacagactagatatgtcaatccgtgagtttttcctacggccactgcaagcccagtccccaccccgtataggatagggtgaaagtaggaggtgtttggtcaaactatcatgagataaaagtcctaacttgcccactgtacgttttagggcacagcatctgggctctttcagcttgggtctccttttggacgacaaggacgagaacagtaaccacctcctttaatcaatgtgaggattaactgtgaatatttaagcaaagaatcaaacccagtgcttgggacctgcccccagaatcactgttaccgctgttacccgtgtttggcttccttaccatctagaagttactttcccagagacccagttgccagatgacagtcaatgataaagagctacgaaccaggagtgccaagattccagcacaatcggaaatgccttcgctccctaaacctaccacgagtcattccttagcaagcatttccccttaaaatttatggacagacataagttttaggtacaatataattctagtaagacagctcaaccgaaagccagatgtttaatattgtcatggcttcatcccagaaataagcacagcacagaggctgtggttgacaggtgaggtcatatgtgggcggggcagcagcaggggtgtgtgagggacatgctaagcttgaccaggaaagagaaaaatgaagaacagaatctccacttcagaagtagttctagaaacaataatttcaaactttccactcccttgtcaacatggcaaaaagagcgagaccaaagcagggcagtggtaggacttgccaggtaaaaaatataggactgaagttggagtttgaatttcagtgatatcagccaatgaggacttccaggagtatgcaagcgttatagtatctgcaataaaattatgccagagaagtgttattagaaattcaatttaactgttttaattcactaagtctggtgacctacatgtgacataggttacaacctgaatgttggctgattatagttagtaatgaaactgaaatactaaggcggggggggggcgacccagagtgatctaaaatgtctctgcctggtagtcaggctatgagaaacccgaagcctgaataagaaaatccaatatggaaacatgtgccctgactttaaagaggtagagacatctccttgggcaaattagtttgtcttgttaccaagatatgcaggtcaaacaatccaatctgtttgtggaaagctgactatattcaaaagctgagcacatgcaattcatggttggtagacttctataattgaccccatttgtcacaactgtagaagacttcatagaaactaagtgcacataccacatgctctccagaacactaactacaacatcacagcacacagcacccaagatacaagaatagtctgtctatatggctttctaaactttgagccactcaaggaaagggacagggtctcacttgtcagagagactccaggcctaatcatgtcctgctacaacacagttcagcagtaagaaagctgccaaatggactttacgggggaaggttaggtaagaataaataaataaataataaataaataaataaataaataaataaataaataaataaataaataaataaatgtgtgtgtgtgtgtgtgtgtgtgtgtgtgtgtgtgtgtgtatgtgtgtgtgtgtgtgtgtaagagagagatgggggagggagagaaagaacctcatttagttttatacagagtacactttgtgtgtatatacatgtgtatatggtgtatgtatgtatgtgtccatgcatatgtgtctggtgtacatgtgcatacatgtatgtatacatgttacatacatgttgcatgataaacatgtgtgtatgtgttctgtgcagacatattctgggcatattcatgcccaaaagtcgatgtcaacatgtcatcttcggccatttcttcacgattgtcatcagacagggtctcttgctaagccttcagctcaactggctggccagcaagccctgctctgcgccctgccccagcactgaggtttcagatgcacactgcgatgcttgacgtacaatgtgggtgctggggtccgtgtgcccgaacagcaagggttgtacccattggcgcagcctcctgacctccaaagcattctttgttcagtgacagatctgagtgccgtacagcagtgaaaaggaaagtcagcaaaggtcttggctgggttgtctttttctttgaaatggcaggtaaaggaagatagatagatagatagatagatagatagatagatagatagatagatagatagatagatagatagacagatagtgggataaagataaataatgagataatgagtagagccttaaggatatgctcatatgtatatgtcagctacaacacgtgtgacagactacagcctcctcaaagtaaataagaaacatgatggggaatttcagcatcatcccttgctaagaatacgcagatcatgaggtgctcaatcacagagttagctttcactaacagacctgtagtgctaatagaattgtaacacaacatccctacatgcttgcctctatactgtctacctggaagctctgaaaactgggatctggtcatggttcccacggacagcatcactgaataaaaccaacatgttctggatgcctagtgcagcatcgggaaagtctcctctgcccctaggagcccctgctctacctcacagaacttttccttatcggcactcaccctcctgtccacaaagcatcccatcacaaagtacctccccaacgtgccctttgctagcatggcctcccatcctccttcttctaacctgctagagcaatcattggctgattaacagagtgtcagtgtaacattgtatcctctactgaccataaatttaatgtgtacaatgcatgctttccagtatgactggtgctagttatgggtgaaaacaagtgagaaaatcttttcacttttatttttagcacgactatttctgatacccgttttatgtgtgcttttatagcacgcacagtctattaggcagtatgtgtatataattagacactgaacaaacatcctggtcattgggactacagttctgtaaggctgcagaaaaaaacttgtaaaagtgacatgggataccagattcctaacctcacagactctgtaggttaagatctgaatgacacagagccaaaggggcttgacttagtctcctgacttttccttaagcaaagaagcaaatgtctgcaaataaagtcgctccaagaactgggtactgaatttacctgctactaattttttgaggggtgggggtaagaactataactggttatcatgtagcccaggctgttcctttacttgtgaggtagacaaggcttatttgaaagactgatcctcctgcctccatcttccaaatgttagtgaaggtgtgtacaaccatacgtggctggaatgtttcaatgtcgtctggacccaagtagggccaaccacagatctatatgtaatattccaggaggcacagcacggggacgtcccagagcaggagtggagagcactaggtgggaaccccatggtctcttgagacatgagctcagaagtcaccaagattcacggtctccatactcaattagtcaaagcaatttcaaagccatccagatgcaagggtgaggagtgtcacatcacattagagaagaaaatacggcatgagatgtactctggctgctgccgtcacaaatatatctgtccccagcttgcctgtctgctctgagctctgtctcctcagctcttctcttcaatgctagatccctctggtagcaaaggccctgaagaccacattgccaaatagaatcttggcaatgttaagtacctgaatgattcccagggagcaaggagatatagaacaagtgaccaactacaataaacctctccctttctctctgatctggtcggtatcttcccagtggctatgtctttcctcctcataaattctatctctgctaggcagccaccacctgctcaggatcccaatggacaacttctaccttattctctttgacccgaaagttcacactgacttttcgatttgctaatctggggtttcgtgtgtggctggccattagcttttgagctcttctgatccctgtttaacaaatccccaatgataagctctccttttgaactacttgctggctgtataataaaaatacacagaaaggggataaatagaccaaaatattttattgaaaaaatataggataataaagaattatatagaactgtaatgtaattttaaagcctggaacggaagtcggggtactcaagttctggttgttggtatcaggaaccagctttacagtcagtcacaggttacctctgaattcagcaataatggtgatatcacccataggcaacaaggacccgcacatctgttgccatggcaatcaccatacattgctagcgaccacctttacctgcaccagtggtgtgaacagttacatcacagcccaaataaaaggtaggcccctccttggccttcgctctcttattctctttgtcttcactgcccccctttgtcctttccccccacaataaacctctctcccatggaactgtactagcctggtgtgatctgtccggacgagcctcaattctaacataacactggctgtaaagcagccattacctatgtgctatttgtttagctcatgggcctgcctttgtgtcctcagccacctggtgaatgaaatctctgggcactaacacactctgactgccactcagatataatctactcaccagatccaggtccaacctagaggaccttacttctgaacatctcactttggcttcaaaataacccagcactaacaagcaaacataattggctacatgatgtcacatacagtgttggcaagactaagcagagctggagccaggtccacgggtatggctagtccctggtgtttcacctgcagtagaagctggaaacaggatcagcacatgaggctagtagcatgagagttccagtcacgagttggaaaagttctactgccttggctctagagaaaaccacgacggccacttggactgggagcctgcaaatgaatctagccatctgcaaatggagacccacccaagatcaggcctgctacagaggcactgcctccccacaccgaaagaaagcttcttcttgacaggaagccatagcttgttacaaaaataaaattatacacatgagacaggacattacttcatggtgggccacatacaaagaaagaaattcatgcctgtgttccttatctgattcaagaacatatatatgtgtgtatacacacacatatatgtacacacatacatacacacacatatatatatatacatacatatatacatatatatatacatatatatgtgtgtgtgtatgtatatgtatatacctatttatatgtgcacatatatacatatgtgtacatatatgaatatacatgtgatatgcatatacacatttccatacacatgcacacacacatatgacttgtcatcaaaattactcaaacccaaaaagcctgtgtctccttcctattttagtgtgtggattgactgtaaactttaacagaccttctttaagatatttaaaagaaaggaagtactataaaaaactagaaataatatgagcatgtacttttatgtaaaaaaaatttttgcttgagcgggaaagagatggctcagcagtagaggcactcactgtgcaagactggtctgaattcattttatagaatctatggtggaggagagaactaaccggcaaaagttgtcctctgatctccatatgtatactatggcacacatatttacatgcctgtgctcacatgtgcacaccacatacactgaatagtaatagtaataataatggcaaaattcctgttcaactgcatagtatttgagggtatacaaagacaccagaacaccttttcagcaatacaattaaggagagccgattccaaagccactaccgtgaagatgcactaggttgccaaagatctaactaaaagggctgcgttctcaccatgtgcctgcagcaggcctacttgagtcttacccaagccaccttggcatccagtacccagagcagaacccatgagacattgaaatcccaagctttcctctctgatgatggagggaaagtgggaaacaagctgagttattttccactgaagcaaaacacacttttcccacttagttaacattagatctgcatctgaatgagattgagttagggtgggaagacttcatctcaatcccatccttgagcctgcacataagaaatgataacttgaaacaatgaagagataaaggtaagcagacagcaggctcagtctgcaaagagcagctccacccaattcatccactgtatgcagtgctcttttagtataatgtgaagatgacagaggcaatgcccaaccctaggggacccatcattgtatggtgaggtcaaacacttatattaacaacctagaaacaagactggagagtgatgcgtacctagtaccacacagaggtgcaggaaaaggtccagggcaggggatacaagccatatctgaaggacatgggaaacttctctgagggagtggaactccagcagaagcatggagagtaaatagggacagagccagggaagaggacctcacaatgcctatacctgactaaaggcatgagccaatcccaagagatcctgtcaaggtcatgggcacagtgcacaggtgagctagagagcaggaggtggcatagagatgtgcagggagctgcaaaggcctcctggagccataatgcaatacccaagcacctctcagagggaaacaggacttcattccccacgcgatgatgagctattaaaggtttccaagaagacagatatgattagatctctgatttagaagacaactcgtggcaatgtgagttatgttcttcaaattcatattccacagagaaaattttgcaacaaaaaaaagaagaagaaaggaaaagatctcttatcagggccataactctctctgtcacagctgccctggatgtgcctaccctcgctctgtcttaaaacgtttcggcatgaaaacaagtgctttaattctccaggctgctgcctccaactgttcactccatttggactctggataccctgtgtgctggcacatctgtctggccagcaacaagctgcgacatcaggagcaaccctggaatgtctcctgagggcctgctcagccacaaaccacccaatttctatgttcataaactcgtacatgacaatgaaaatcaaaaaggattcaagattgaataagggggggaaattgcctctgtggcccttaaccagttatttcaaggttatcttattccggaattttccaaactcacagaatcgtcatccggaatcttcctgccaatgtcgtgatattgagtttccaccagaagtccctccattctaccctaggtgtgcagagacttgatctatctggggtaaagatgtcccacaggcacaggagagttccgcatttctttttagaaggaataaaaatgaactagtttacaattccatctgagcagaatatgtgaaccagaaaagagaagaaaccagaaacaatgaagggcaggccatgtcacagcacaggatcaaatatagccaccatcagctatgtttgctctctttgctctccaccgtttcactaatacagccacagactgctcactgggagtcttttctgaggagtcagcccctgttaatgcagtaattagtacttttgaagtcataaaacacatgggaagaagggcatatgagatacataccacatgtatgcacgtgtgtacacacactgatacaaacacaggagagaggagagcgggtaaaggggtttaaccacccacaaggtgcttctgttacctctccatagaaacttaaggaagagcatcagcgacctcagccacattcctactgtggccatggagaaggctgcttgtcacccatacaccctcctccgagtgggcttatgagaagcatatctgtaccttcccaggtccaggctccttcctccacagctggtctctccatggaaggtgaaggtgatccctccacacaggtgcaggaggcccaggagggaaggttgaggttgaagctgcacagatgctcacacacacacacacacacacaatgctagccctgaaggcagcagtccgcactccctactcccttctgttactgtttattactctttaattgacaaatgaaattgtatgtatttatttgcatgaagcatgatactctgcagcatatatccattatggaatggctaaattaagctaattgacatatgaattacttcattgggttatcatttttgtggtaagaacacttaacatccactctgcgctattcaatacaatatgttgttattaattatagtaatcatagtgaatgatgagctcttgaacttatttctctcatctgactgaaattttatgtccttggccaacatctccccactagacagccaccattctagtctctacttccataggaccaagaagtctagaagccatgcaccagagaagctgtgtagcatttccctttctggcttgctcatttaaggagtaaaatctaaaaggaggtagagctaggggtgtaacctagtggtttatgacttatttagcataaagaaagcccaagtgtgatccacaatgcagagaggaaacaaagaaagtagagaggggagggagggaaggaggaggaaggggaaaagacaggaaataaaagggaaagggatggacaaagaaaggggagaagaaaggacaaaaggaaggagaaaggagaggagtggagaagggaggggaggggaggggaggggaggatagagagaggggggagggatggaggaactgggaggtagggaaggggagaagagagctgtggagaggaggaaaggagaagagagaagcaggacgatcctttgcaacattgataactctctcctctctcctcatggcgatgttcaaaatgatggtaccacaaatactctgacaaagttctgctctatcctctgatacatcctagtccctgagcaggaagggcaatgcagaaacccagagaggctactttctgactacaaatcaatttcttcacacaatcactgtagtctagaatggctgtgtctgccctggaagctacctgccacatatggctgttcaagtttaagttaacgtgcatcctccagccttgctattgccccatggcccagtgactattacgttggacagcaaagaaaattggatatttccaacatggtagaaactctcttggacagcgctggtttccagattatttcaacaagttccagttgcaccttaaattaagactaaaatagagtgctttcgataaagagaagcgagcactaattaggattaatttcaggccatcttcactaataatggtctaataatggcactttcttcttaaacactggcattgatctagacaggtgagccctaaagccttacctaacaaagtaggaagaggcagccagagacagtaagggaagcaggatccctaagtttacaagggatgagtccaaacatcagcacaatccaggcgcccataagcaagtcacctgatctcctctccctccgtttcctaatggaatcagaacatctatcccataaatcaagcagcttggttcacgtggctgtttgttgcaacgtcctaagcaagggctaggcattagatcggttccctccttctgttttttctcccaccaccaacaccactacaaagactcatgaagtacgccatgcgtccttccttagctttgagaaggaaaggaagcaactacatggacatcgttcattgtagttctactctattcagaacactttatttgtgattttctttaaaagagagggagaggtggaatagtggaaaaaaaagatggagaggaaataaaatgtaagctcttggagacgtttttaagaaactccttagggagctggggatgcaggttaagggcagagtgcttggctagcatatgtgatgctctgcatctaatgtcctgcgctacgaataagcaaataatagtcttggagattattcttccgatacatctggaagagtaaagcaggataaatggagtctaacaaatactggaatccagatgtgatcctggagaataagaagagtctggtttgttatttgagatgttttcccaggggagttgaacacggagccctgttctgaaagttgtaatggtgtggtctgacaaacaagggggaggaagaaatgatagcacttcaaagtgaaaaggcagggaaggacaagttcagacagatgcatgctgggaaacgatggctggtggggtaagaggcaggtagctgctggggtgaagcccaggtgcgagcgtggtcaggcagtaagggctctgtggggaatttccctttcctaataatgagtaatgtagagccactacggattcttgagcagaggaaaacagtgtttaagggagacaattccggcagctgtgtggaggatggagagaggcctacagggaagccagtgagggccctgtactaagcagggaaccatagaaatggaaatgagaatcagaggaggcctttctaagaaagaactggcaaagactggtgtggactggaagtaggggctgctggagagggagccagagggaatgggtgccaggtcagtgtgcctgttgaaaacaacggaagctggggggggggggggtctcgtggccattgagacagggaagggaggagaaagctgggggttttctctcctttactgttttcaatacaaggataacatgccaggggagatttttctataaaccactggagacataatcacatgctggaaatgcagatttcagaaccatcaaaatcaatgtaactgaaaccatgtgagaaaatgagccgtctaaagaacggagggccaagcaatgggaagtgggactagatgatgctttgagaaaacaatgcgcatggagagcagaagggatggttggcttgctcagctggaatgtagccctttggggctgcttagctctttgctgcaggatactgccctgggcagaggggaatatatctttagcttctacccactagatgacaattctctccccctctcccagttgtgacaaccaaaaatatttctccaaatattgtcaaatggactccagctaagagctactgatggagaactgagaacagcatccgtttgttccaggcactgttgagagggcttcagatgtgttcacttattgaattctccaaacaacatgctgaagcagctgtaactgctattattctctattattcccaaattaggaaaccaagactcggaagttaagtaggagcttttccaaagttccaaataccaggatctgacaagggcacgcagtgtgtctacagggctcatggtttggttttgattggttgagtcttgtttgcttgtttgtctgtttgcttttcaaaacaaaaaagctttagtgtcttatcattaaaaagtagggatcatatgcaaacacactgtggagacagactcctcagagccctctggggctgagtggagagtgttaagtggatgtgtgagataccagaaacatcaggtttgaggaactgggacactgggacaggacaacttgtctgggaatgtggactccagaaagaatgacagggctgaggaaagaacgtgcattttgggttgcagcaagtaagactttccagtcaccatgttggaaacagcccaggggtggaaagatgagattttacagtgaccagctggcgggaagcagttgaagtggcaactaacaggtaagagaaggaataagacacacagatgctctgagatttaatggtccacggactagacacagctacagggtacgccaaagtaaaggtctgtcactcagtcgtccagacatagtggtatctgagaagaagaactccagagtggataggtgaaatcattttcagaacttcctttctctgcctttcatattatggtgacaaaatagagggagagaaaaaagacaggattataaagagtttgatccataatagagaaactgaattggagtatgagaaaaagaaagtacaataaggggcatgtggtggtttgaacatgcttggcccaggaagtggcactattaggaagtgtggccttgttggagtgggcgtggtcttgttggaggaagtgtgtcactgtggaggtgggcaattagaccctcctcctaaccacgtgggagccaatcttctcttagctgccttcagatgaagatgtagaaactctcagctcctgctgcaccatgcctgcctggacactgccatgttcccaccttgatgataatggactgaagctctgaacccataagccagccccagttaaatgttgtccttataagagttgccttggtcatggtgtctgttcacagcagtaaaaccctaagacagggtggaaagaaacaaatggtatccacactctggagaaagaagtatctaagatgtcacctggtgaggtcaaatgtcagtaacccacctgaagcagagaaagcgaagcctgctatcacaagacaggaaatgaggtcttaggggaggggatgagagaattttgggatggctcctggctggaaagctgtaaggaagggcacgccaatgcagagaagacacttctgtgccagcaagggacaatttctgtgcaaaagaattgtgaaagaactcgtaaactcaaaatgctgaaaatctttgaggtgaaaaaaaaaacagaataaagaacaacgctgttgaccattttatctgaataactaaataaacaccccttctattaagatcagacaaagttccttccctctgggcacgctgggccatccacttaggatgaaaaatctaagaacagttatttccacagcgtgaggagttctgtgcataaaattacagcgctaagagcatttatttaatcaatccacaaaatcttcaggaagcaggagtctagtggaatggagcccaagtgtggccgggagttacaggaaagcagagagtgccctcctcctcctcctcctccctccccctcctcccccctcctcctcctcctccgtcacagacatggtgggcacaggcacagcaaggatgcttgacttctccacactagacaaggagcagctggaggcaggcaaagaaggtccacagagtccttctcaagcctgactgtgtgtttgaactaactcggcagcacacatactagcaccgtagagattagaatcccacttcaatgcgcattctgtaaagtttcccatatcctgcaaacaaagagcatctggtttgtattgtcatggtatctatcttcacacgcacgtgtgcatacacacacacacacacacacacacattcacactctcacacgtgcctagagctggctctttcaaatagaagtacaaggaacaagacttcatttaagctttaccccccagctgcatctaggctgtagcccaaaggcagaaggaagcatgaagatagtagcagtctgggtctcttcttgattccacaccctcctctcttccacccctgattccggtaggaaaaggagatctggagtcagtaccttaaacacctcttttccagtggaaagagaaaggttgaagggtgctatcaggagcaatgtttttcccagcctctggttattaaactcagattgtagctaactaccgtaattttgtgtagaagccctgaattgcttacgttcctagtaggtacaaataaactaagacaaagtattcattcaaaacttgatttaacacatgccatttgaataccatccctaattcttttctaaaatgtccgttcaccaccatttaggggcagcagtaagacgaaggggcttacacatcgtaaatatcagcgctgaggaggactggactgtcccagtgattgtaacacccaagcaagcccgggaggggctggcagcgggcaggctggctgacctccacaaagaggttgcaaaagctccctggagtccagactgaacttcccagggtggcagagcagctgtcgcattctgattctcccccagaagtgtgccaatactgcctctgacttgtcctctaatcgaggactgagcagtggggattcagcacggcccctccctggagaacacagctggccaggcggtctatccacttgggtctcctccagatgtctatctaggaagaggacattccctgacagctcactcaccctccaccttttttgcctctcccttcctcttatatttctcctttccctgattttttccacctcaccacaaaataaaataaaataaaataaatataaaataaatataaaggtgaaggagcaaacagcctaatatcttaagcatattctctctccccctctgttgctcctccctcccccctctcttcttcctcctcccctctctttctacctctttttccttttttctaccaatctctgataattcaaggcaccaaggctccaattctctccagagatcccctgactcccagacacgcccagtgtcacctgagacaatggttttctgtggctttagcatctccatcataagcacgacacatttacatggagacaggaaagaaaatgcagaacatccttcacggttgttagttctttatcttgccctgccaagcatccagcagcgttgctcatggaaggtgaacaagacaggcaacagagctaagttccaggtgcttcacctccctggccttacccaaccttcgtctcacctgcgtgggctagaagccaaagaaccaggtgccctacccgatgtcactcacaggcaaaacgacagatccaagagtccaaactcaagtctcattgacgttaaatccctgttcctgactcctaaggatgctaggggtggtacagtaccagtcttaccctccagaccccagcttctaaagttagaggtttgccttggtgtaagagccgcagcagtcccagcctggaaaccctgagaacgtgggacagaagtgtccaaagaaggcacagcccgcctagcagaagagagacgtatctcccactgtgagaaggcatatggagtttgtggaggggaggaaaagactatcagaaatcttaaaacccttctccgtagggtcccaaaggtaagtgaatcttcatcggtgacaagaatttgatctcaaggcctcaggcaaggagcacaaagtctgttaggatgcatagtgatacccagaagagcataaataaagccaattttctgtgtatttccatattacctgaaccacattagcccctctcaggactcctcatcccattccctgcacagctctgctgcttcacccccatctttccatttatgccagtgtagagacaccttcctttctgcctccttctctagaacttctccctgagtctccgtcatggcccgtcagctcttggaagatcatcggtaagccggaagaccctgtcctaacaaagacaccactgtacacattccatacagccaccaggctttttgcttctagaagaacaaggtcccaaggaaaactgtcccttgagatctccactttctaaaaccacacaattagctgcaaagccagcaggtgagctctgggcaagtggttcacaagcacgcttcacacactggcattaaggaggaacctcaagggttccaaatcccctaacatttcaactggaggaatctctgagcctggtgggaaagtggctctttctggaaaaatggtccagaacattcattttaggcacagctgattaaccaggatacggcttagaggtaggggtagaagtgaggggtgccaaagacagagtgggatggagtttgaaggcgatggggtggcccatacaggtgctctgcggccccatggctgggcagctgactaacagagtgccttccccttttctggggaggagcgaagcacagtacttcagaggccccagccttgctgaggatgttaggagaggttggactccaatccactgccccaccagcccaggacaagaaggaatctatcactaggtgtgttatcagtcacagcattacccccacccatgtaggagttagctggggaagcctgactaactgcgcttattttcccttaactgtatagatcagcttcctaaagctttctgccaggcccgtcctccgtgcagaaccatggatccatcaggatctgtcttttagaaagctagttagatgaccaccatgccctagacacttcaaggtgttggaaactgacagtttggctccatagattctcaactagccatttatgctaatgattctgtagtttctagccaccactctttttagaaagaggacaagccaagctagcctttggctatatttctctgacctatgcaatagtctccaatgacttcctttggccccagtcatgaccatttctttcttaagatattttagcttctatcactaagacctgaggctgtttattattttctcagtaatgtatgttttaaaattctctctaatgttaaatcattttttgttccctagcttacattaaaattcaaattatagacatacacacacacacacacatacacacaccagcatcactgtgtatctgcaactagttcccaatgacattgcttttgttacattttatttatttaatttgtgagaagacaacctgtacatttgttagctcttcccttctgccttatacaccctaaggattaaactcaacacaccaggcttagcagtaagtgtctttacccccagagccatcttgccagccctcagaaattaacaatgtatttcctgccttggctctgtgaagacaggatttactattttacttttatttagttgttaacataaaatatcctcatcattttttctgattatgaaaataatagaaattttgttaggataaggaaaaagataaagaggtaaaataataattgtctagttcctgccgggcagtggtgccgcatgccttttatcccagcacttgggaggcagaggcaggttaatttctgagttcaaggccagcctggtctacagagtaagttccaggacagccagggctacacagacaaaacctgtctcaaaaaaccaaaacaaaattaattataactatataataataataaacctctatgtcttttcaattttcattcacattcaacccaaattaatagaaattctaaaaatgcatgttcttttaggttgattagtgttgaatgcaggggctcacacatgcctgcacacggaggtcaaaggactacctgctgaactcagctctctccttccagcatgtgggtcctgaggttcaaagtcggatcatcaggtttagcagcaagtacctttatctgtcaagttacctcaggagcctcacccttgtatgtttcatatggaatgttaaccttgtttttgcaggcttcgtggccttcaccatttctggctatgaccaccatagtaaattccttgttcacctgagatggacatcagcaagcatgctactctaagttatcggcagggctgggcagagggagcctaggcctgagattcagaagagctgagaacaaactctgggcctcccccaccaccccttggctccttgctttcataaacatgacttcatactttggtttcttcatccattaatgtccagggttccttgcaaagaaaagctatgtccagagaaagaaatccacacggaagactccaaaagctacagaatttacagaaagatagaagtgggggctactgctctagccagcatgctctgtcttttgttaatgtcattcttagaaaaaccttcctttctggcactttggttttttgtgtttgtgtttagccttctttacagttattcgttttattcaactctagatcagttcatagttaatttccccaaggtttatttcagcctgtaaatcttaaatgagtgagtctctatttgaggctatcttctgcatttttctgtactaagaatgtgtcctccaaaataataattataattataataattatttttaaaatgtcacctcattgtcatattttatttttccaggtataacttgatgaatctctcagaaacgtcaacactagattagacctgggaatctgtgggatatagtagcaactactgtctccatctacaagacattaaacatcactcctccagcacccaaactggctccgattagagtagataccagatgaggaacaggggtggccatggtaactaggactcttgggaaactcactttcaccaaggcctgctcaaagggaaataagagaagctgttgactagccagaacgatggccaaataacggtctatcacagagaagtgaggctgtctggcagtctacagcctcgggtcttactctcatcctctgctttctgaatgttcaataagaaaggatggtggagatggtagctatgaatgtcagcggtccaaggggacagcaggaacctgagcagcaggagcgatggcgtgctcaccctccgttcacattcgtgacagctgcatccatcgcatctctagacaactatcctgggtgtgttctctcgatgatgagcatacagggagctgaaagtcctcaaacacccaaacaaatcctgaccacaatcattaaagcccacagtgcatctcctttccctgttccactgtcctcattatatagagcttagcacacactatgtccctcctaagtctatgactacaatttgcccataaacatttactacaaagatatagagaaaagagcttaagagggcagctctggcctgactcccgaaccccaagcctggctctgccacttacgctaagcaggctttgaacttctccatggctacatatctgtaaggtacatataggatactcattgcacatccctcctatggtggttagaagggctacattaggtgattcctgaagcccccacaacacggcagcgacaccagttaatgtgcatggtgccagcactgaattgggcacacacacaggggaacagtctggatgctgtttctacccttcagaaattgacaggcatgggacgcagatacacaaagggcttgttgattcagcttatggggggacaggaagacctggagcagaaggtcctggaggaagatcataaaggtggattaggcataaggcacaggtgagacgggagaacactgtacacagagtgacaagcctacggggcaagactttgagactatccttcttggcttctgtcaccatttccatccctgctcttcctgagtcatgtaaagatgaaagatgagcctagaaaaaaaaatagttccacacataaagccggaaagatcggtcttgctctcctgtctgacaagcattcgtctagttttctcgataaataccgtgaaagagaacctgagaaggagacaccaaccagagataaagactctcgggtcacagtgcctggatgttgttgctctgtgctcagaatgtcagtttctttgccactgttgtctgtcttccccattaaatgtgttctgttctctcatcccctgggagtagatgtaacacgtggaaggccccagaatgtatcaaaagcccagagcgggacaggcttcttaataatgctatactgcatgtggagatattgagcctacacttgagaggactttttacatttttctcatttgatctgcagtacaacttcgtgccctaaagatatcattttacgggcacagaatgaagttccgtgaggttgcaaagcttgccagaatcacacaggtcagcttagtgggacccagtgggacctggtctcaataataatatttacacttgtggcagaacccaacatagagtgattctcccggctgtcattctccactcaaagtagaaatttaacatgggctttagaataaaagagatgcatgagactaggtgatctttaacaagtctgtgcagggagcagggagaaggaccaacttctccatcctagagaaactcgagtctacaagatcaggatgtagtaaatgcacagaacaggagactaaggaaatcttcccagcccatctctatatgaaagaaggcggcactggctagcatcatgaatgccttacctttcatcctcatcaaattaaattatgatccaggaattatctgtcctataggaattcttgtttccactttagaacaaccttgccttttgccaagtgcagagcccaaagagaaaaattctaaaaggaagttgcttcagctggagtgtcaacgtctatcacattagaggctggggagatggctcagcagtgtgcttgtctctcaggcacagggacctgagttcaagcccccaacacccacagaaaacactggtagttggggaagagacaggcggttcctggagcttgccaggcagccagtccagctgagtcagtggactataggttagtgagagaccctgtcctaaatgtaggatgaagaaccactctgagaatctgacctttacgggcatgtgtacacatgaacacatacacataccacacacgtacacacacacacacttacacacacataccacacatgtacacacacacacacacacaaacacacacacacacacacacacacacacttatacacacatacacataccacacatgtacacacaaacacacacacacacacacactcacaaacacacagtctattatgttaatgagtccacataattctgaatcttttattacacagcagaagttccctataatttaaagggccaagggttagtcacactcggaagacgtaatttgggaatctggctgcagcttacagatgtgtgtccttcagctctctaatcctcaccctgttagtctaagaaacagaaataataacatcggccttagagagaggattaaatgagataacccaggtcaacataactcataacatcactggcacaccatgaatctttccaggcaactcaaggccccatctccgcaggaagctgtctcaagagaagacaaggaaagaccttgtatgtgactgtcatatttgggcagacagctataattcttagcattttcaaatctaccatttccggctacctatttccagaaccttcccagtcctgggatctaatgtctcttccagatgcatcaacgcaagcttcgtcaccaacatcgattccttgctatggccactgaaagatcactggtgccagccttcatctcgaaatcacagactcctcggaagcaggtaaaggctaaaaactgaggttggaagattggatgacagcaatcccagacagcccggggttgagaaaactgagagtgtcatgggacagacagtattggaaacccctgatggaagaggtctgtgcgcaacgagctcctcataagaagagtgggacaagcagaaaatcattctgggaacaggcagccaaacagagcttggttccacagagggaggccaagcaaggcttcatgggggagactccctgtgaagcagacctggaggaaggatctaaaggccatggttaaagagagttgttgtgtccgttgcatgatgtggactccagtccagtgatgtggggtgctggggtggggtgcattttcattcctgctgcctaagctgtatctaagcatgactgtgtgctctcagattcagctgatcccacccaaggcagctagatgtgcttagctgacaaagaagcagagacataacgccttcttcatcaatcacactgttcctttgccatctttgccaacatcttccaactgctggccatggactgatatccctgacctgaggactgaggacacacagtgacaccaaacatgaatacaggacggggatgacaaatccacgagaaacaaagttaatttcacttctccccatatcagctctaagtgttcctttctttaaatacccgaaagacccacacaatccagaggatctcgaaagccatgcaactggatttggccaggtagagtttttctgaaccctgtctcaggaaaagccaggatctacactgggacagaatctgcaaaggactaacattttctctattccccggaaagtcagaaacaaccccggggtctgagccatccactttggcccccacagaactcgggggaaggaggcctgagccacatgagagccattcccagggctagtgctacaatgtcctcaagttcagaatgttctgcacacaaaaggccacccagcaggtactctgaaattcagatctttggctgtttctcccctaaatatttagtgctctgaacaccactagcatccagccatccctcccacatccccgtccccatccccagtggctattagcagatgtccaaaagagaacaatggtttgtctttgaaaagaaaacagacccataaatctggattctgttcttgccattgtacatttagattcacatttattttaaaacggggaagggaggaagctgagaaggaaggatgcgaaaaaactattagcccagccagcctaataatcggtgactaaagttacagtcaggaagagcgacgtcttaatgcctcctaccctctgccttccctccatgcctttaatattccactccgggcacagagagggagggcaacggggcctagtgaattccaactgctccgggataattgcaccattcagggccctcaccagtcaatcaggggctgcttatccagccccatttattaatagttttcctgcatttacagtgtacaaaggagtgaaatggggctctctctctctctctgaaacaagaaatggggcaccctcaataccgactaagtggaacggagcatgctggcagaagtggaggctgctcgccctatttcacagccacacctgtcctggggtgtcagggaaagtcttcgtcttatgcttcctaacattaaaaccaggcccatgtcaacattgggaaagctcaggcacatggtcagggggtgctgagtttagtgcaacccaggcctcaaactctgtgtacactctttgcattgaatcccctcacatccctggctctctacagggtctctctatacaatcaaattgctagatcgtgtcataatcagggctaacacctgccttgtcaaccagctaatggaagggtctcaaatatggccacacatagcctagtaaacgtgcatacctttaattcagctcttaagaggcagggctataataagtttgaagccagtgtgggctagacaatgagtttgtgaccatcctgggctacgtagtgagagttcaaataaaataaaataaaataaaataaaataaaataaaataaaataaaataaaataaggtaacattagactccactaagggacttttaaaaatggccactgttggaattcttcctgagattgtgtgtgtgtgtgtgtgtgtgtgtgtgtgtgtgtgtgtatgactgtgtattttgtgtgtgtatatatgtgtgtattcctgagtgtgtccatgtgtgagtgtgtgttcctgtatgtgtgggtatgtttagactgtaggtgtttttggaggtgaaaggatacctccaaatatcattttgcaagcacaactgttcttcatggtagggattttcaatcgccttgatctggcaggctggacaggctgggagtgaacaccagggttccccagggctgggattgcatgtatgtggtgctaaatccaacttcagttttcttacttgtgttctggggctagaactcaggctctcgagctttcctggctatgccatctccccagtcccttcctgggagttttctttgaatggtttagggtcacatgatgatgattcttttttggttgctcagcttttaaaatttgttttcagttcagctctgatgcagaacgaaggctaacaaaggctaaggaaggatgtaaggttgtatcgcccccgttactgggtgaggagtctgagacccagagctgaagttttacacacagtcgtgaagcaaggagcagcacagacacaaatataaatttctcccccaagaccacctgctcagtcatctgctggataatgagactgaaccccacaaagacgcctgacttacaaagggggtgacctgtgctcccaagatctgtggcgcagtaagtgcccatcactggctaactcaaggtttatcctctgcaagtgaagcacgaatttaagattcattgtgcagacctactgttcacacacacacacacacacacacacacacacacacacacacacacacgctgcttgtgattgtcagcattgtgtgtgttgttcatctctggaccagacatgtacatacacacacacacacacacacacacacacacacacacacacaaacacacagagacacaaacagacacacagacacacacacagagacacacacatacacaaacacacacacacatacacaaacacacacacacacacacacatacaaatcaaggctacactggatctaaattgtataacctttcaatgcatctcacatttgatgtgtttagtgattcaggccagtgttcagagtaggtaagtcaccgcacctgcagtatgtttggtgttggtgaagaattagcgtgtgtgtgttctgatctctagcccagacgctgtaatgtatatgagcagatcatggcataataaggggggagtcttactttagaaagcttggtcactttcacagaggcaagggaactgtgggaagggaggattaaagatgccatgtaaaccctaggaatggttcttccccactttgctaataatacaatgcttttaaacaacagtatttcactaagtcccatgactcaaaagaaataaaaatctcctcatttcctaaaataatccacccagttaaagtgctgagagggtctacaaaaagaagaatgagaacttgaaacttggcattgaaaaaacagaattatgaatttgcagtcctagtgggccagtgatcagagactacttgggggagaatgagcaggggtgggaggaggaggccagagtaggagcatgtgtggagacacacactggcctcaccactctgtcctttggaggtttttctttctcttaagcatccatccccaaggaaggacaaggccaatcacttctctctttttcctgatctgctattccttgggtccagccgagcctctgctctaccccatcctcaactaaccagagaaagaatagcttattgctctgtttctattccctgcccctccagtcaccttagaacacacgacctttaagtcaagatatttattcacccctgtatcttcattcccaccatactctttatgtgaaatggaccttaaaagtgtctccagaatgaaatctagtcctggtggcacttgcctaaaatcccagccactagggacgttaacaggggaagatcatgagtccaaagccattgtagactacagaataaattcaagaccaccctgagtacttggcctcaaaaacagaagtgttttaaatgagtgggagacatacataggacatgcatcttggtgctgaagtgcttatcttacctagtatacatacacaaggtcctaggttgaatccccaatactgcaaaaattaaaattaaaagaaatcttcagaccaagcttaataataagcttttcctaataaaattaataaatttcaccacgtacagagagatggggagagtggggaatggggactagaaatagatgaaatacaacttagcaaagaatccattcaaattcatctttccttaagcacccatgtgacagtttaaccaaaaggtgaccgagatgtcacccatcatccctacatccaggcatccctcaaagtaaaaatatctacaatatcaggccactccaataaggcaactaaaatgtgtcatggagtgcctgagaataatgggcacctctgttctcctcgcccctctgtgctgctacagaaagctgctagcggatgaatggtgcggcactctacctcactactcaagaaacacatggggcccggctggtccttcattccaagtagcctggcctgggctgggatccagctctttccttggacacgaatcagctaacagctgtccctttctttgtaatggccatcaataaagttagttgcaatccagtggtctaaaatgaaaactacatcatttgctcattctagaggcaagtctaacaaaccgggtgaggattcattaactgtagactcgccaaagcagaaattagagagcctcagccctccctctaccctggtcctttgtggtcagagtctcggagctagggaaccagcacagtcctgctctggtcctcagggatgcaagacaggaggatgggtgtctatagcagcctgactatagcagccaatgcattctcacggaatggcttgtccttccttgcctccaaaactcttgtttgttcttcaagaaacaattcaaccaccaactccttccatgaatccctccaaacctcttccccaccaacttgcattgaaaggtcttaaataagtgaaggtttcttcaccctgtgtccttgaagacctccaggatatagcttatctgctactgcaatatgaagagccaattctttttcatagcttgattaatattgcctttttatcaagtatttattgaataattgaacagagcataaaacatacagataaatgaaataaggcaattgctgtgtgcatgagaaaagataaatggatgttaataagaaataaactaagaagcaggagaaaatgagaagacaatccattataagaaagcccagaaataagaaggtatagaggaaacaaaaaaaggggtacttgagtagaagaattataaacaaaaaaagtagaataaacggataaaattaaacatattttttctgattagaaaaaaaaataatcaaagcagagatgctgtggatgccacaagatttaatgaagagattaggcattaactatgatggtgctcagatgtatagtgggtgtggacctgaacctggtcatacaagaactctgacatgctaaacttgaatatcaggtctcaccaaaaacctatcaaatcaggatgtgcattttaatagcaccccgcaagcccccatgacttctgtatgcaataaagtttgagatggaatgatgtagatatgcaaagtgcacaaacaatccccagttctcactaccatcaatggtggatagcaggaaacgtcagcattaaggagctacataaccttgggacaatcacttccccagatctcagcttcttcatctatgggatgaggacagagtagttgcctactgagtttcgagttcttgattacatctcccagcataccattacctcattctataccatcaggcaaaaaataaataaataaaaaataaaataacaaaaagcacctctgactgataaacactgtgcatcctgtcccagctcattctcccagggttatcccgcatctatcagatgcctgtctctgcgttgagtacaaatgattccaagatgaatacacatctctccctgcccttggggagctcgtgagcttctgggagaaggaagaaggacgcgtaaataagagaaagcaaaggggtcttagaacttcaaatacatgctagtaaaacacagagagggcaaacaaccacactgctgggagcagtgaggaagagctgttaccaggagacaacaaaatcatttgagttcttccctgccaacctcagctgacagggctagagagtgacaggatagaaaaaaggtaccggaacaccaagcaaagcaaagaaggcccctgagcacacctctctggtctacacatcctgagaagttgacccaccagatgggcaggtgaatcgggctaatagtcacagacagttaacatctccactgcatctagacctcagaaaccagaaacctacctcctccgagttctgtgtgctccctctactgactgtgctcagttcttagcatcttcagcctcctggaagacaataccaattcaaccactaatctctccctggaggtttcttctatggttacaaagaagagaggcactttaataaatgtaaacaattcattacaccagcaactcttttgatctatatttgtttacataggaacagtgcagtagttcccaaccgagtacagggtcacggagactaaaaacggggttcactgaaggatgtaatctctaggattcttaaggactgtaaaatggcaaggagaaagaaggcaatcttaaatttggcagcccctactcttgacccccatcaagataccaaggatgagctgagaggtcatttgctatcatcaccgttcaagaagcaggccgtcatttggaacacctgcatccaacctccacaatggtgaggccatccctggattccatctcttgtgtggctctaggtgttgatttgaggtcatagtttcttcatgttcaacttcctttccccctgcttccttctgtgtttcacagcccccaagtattcactaaatgtttacagtagctggccaatactggtgaagatgttaccttcattagatccttgaagaaaccctgcccttgggtttaccacagccataaaggagatgaaaaatacatcttaaagcttatgataggccgcagaatccactcagtcctgattctccccccaccaaacaccagtcactcattacagcagccaacttttatcgtgtctctctcaaaggtagccattgcccctccccatgcaagcctacgtggaagttgaaggtctgagaaaatggctgagttctaaagccattctttgggagacagaagcacagagacaagaccccttgttgttcaccctccctccagaggaagtcgctcttcttaaccagtcaaaaaacaaaaaccaaccaaacaaacaaacacacctggggaacaaagtagtgacaaaaagaacttttctctcctctcctctcctctcctctcctctcctctcctctcctctcctctcctctcctctcctctcctctcctctcctttctgcgattctccttacttgtactctctgcctacatccacccctgacaaagatcacacaccatcagtagcagaacaagaatctgcaggtgggcaggcttcctagagctggaaccaacaagagagacaaattagacaattctctggcatgctctgcttctgtccctgcacactagcccctggaatgtcactccttccccaggtccaccctgcactagcatacctagagcacagaaatcgagccacatgtggctcactccccttaaaaccacatccttagccctgctttcctgggaagtcatagtttcctattgatgtttccttaattacagaccacagaggctctttcattgctgtcgaatgtgttcttcttcatcccaccagtctcaccactccccatgttgcccatgccacaagggtgagggcaaaaagcaaggagatgaaaggaaacccattcagtgataagaagcagagagctacaacaacaaacccaggaaggcccagaatgccaccaagtcaagcagcatgggcactgctcatgatgacaggtcacaacagagtcctcaaaatggcttggaataccaaaaagctgcaggccacctgtggcagtgcctccttgatacctgacaagtctttcccaactggatcgcctctcttttctctctatctttctcggcccctttgacttctcttcctctgtattctactctttaatgtcttctcctttgcccagtccttgggccaaccgatgacagcttagcacttgagtgcatcttgctggcatgcatggttgagaccctgcccaaagtctccctattgattttatcaccaaagaacattgatttttttttatcaccaaggtcctactcagttgcagaacactatcacaggcaactgtgatgcaatagtggccacatgccctgtggatagccacctctcctcgtccactcgtgtatacaaactctccgcacattgagctggcatcctcactcattcctctgttctattttgaagtgaaatgaagagttcttcctcctacttggaggaggaggagaagtcagggagccagctcaggtggctctaaggtgaacacacaccagataacctcagctatttgtagacgtggtgagaacatggttcaaattgggatcccaacctcactctcattacaccatggttacagattaaggcttcagcaacgagagcttaaagaatgaggcctaggggagaggagcaggagatttggatggatccatatccatccttactaaacaataaagaactatcgcccactgtcattctgaggggctggcaaggaccttctactacctcccctacaacactttagtatttttaggttgttataaagggtgattattttgtaaacgacttgggtgaaagggaagggagtgcttgggaaagggctattgactgctcatggctctcctacatatttttgaagaccctttcccaacctcactcttgcatgagaacatcttcggagattccagggtgtatagacagtatagaaaggagatgagcagctgggtccccatcttggccctcgagccacagatgctatgattttctcaggagttgtcttggcttgcctgagtggctagcagaagaactgttagctaagtcttttccattcctgttgctatttctctttccaaatgctgtccaagatattgggcatatttcacatatttttatatttatatatattattataggttatatatatatttcttcacatatataacaatttcaaatgttgttgaaatgaatgggatgataaaagaaattaaaatatcaattctatttttgagggtacaagatgaacacatgcaagcagcacatctctttgtttaacacaaaggctcacatgtcgaattctgcaccccttccacatgcacggcgctttagaagtctgcaagatagccattttgcaagagtgtggaagtaacagtttgcttggaggatgtgcgggtataaatagatgtgtggacagaaggagaattttacagctcaaaaaataatagcacacggggaaaagatacaaatgaaaagcagaatattgacagactcccttcttttcaggcttaaggttgaagactccagcttgcagcatccaggtgttctgagaccagccagtccctacctgcacctgcacctctgcaataggcctcctgggatctacggcccagtttcaaccctttctttagacaccaagtaggttccagggcaaaagccatgataatctcgatcagtatttttctgtttctgcatatatacatatatatttttacagagcatagaaaggatgcctaaaaggaaagaggagatagggaaacagaaaggaagatggcaagaaacaagtctcagcttggagaaaaaacatatttatctagatgcccatcaaaatctaacattagctctgtgtaaatcaaatgctccttaagtcggagaagcatacaggtcccctggctgcctgtgtctgcatatagacataccccctcccagcctgcaacctcttctgtgcctgcatccaaccacccccaccaccttcccggaaaaacaaaacctgttagatagcagaagcatgagaaatgacctggaggtccccttctttgtcacagaagcctttcccacaaaacagcattattttgagatcatgttattttttttctctcccagaaaaaaagaaatatcatctgagacactgggggaaaaaaacagatttaaaacaagaaatccccaccccaggtgaggaaaaagaataaaatagaatgtgccctaccttggtttgtagaagccaaagctctaggcggacagattaagggagagcgcatgttgggaatatccagagtcctcttctcgcttgcatatccacataagaaagacggaggataaagggacagaagaacatttaaaatccagtggagtgtgaatttggttttaatcttgtgtcttgaagagatgtaaattcaaaggaaaaaatgtaatgtgaaagggaatctcagggtgtggagagcggctcacaatgcagaatccagagccattattccatgtgcatgtgaggttagtagcccgaatatatagatttaaggagtctccggcaattaagggttgggttctcttttcttttttcttttctctttttctttttaattttttggagctttagtagaggagtctctgtgtggagaagctgggggcaggctctgtccctccgtggagcgtggtcattcccaaagcgtccccttcctaaggggaaaaaacgaggaggtcagggtttgattcgagtgtctcccggagggttagcaaaatgcatgccggaaaaaaaaatatagatatctctataccaagtcgttataaggaaagggggaggaaaccctgcatttcccacagagtacacaccagaggaattgaaaacagctggcaccaatctataaataattccgaaaaggtctgcctatgccgttcctgggacaggcatggatgaaaggtgagaaaagccaacctgaatggaagagagggaagagggaagtggaaagcaaggaggaaggcagggagaggaggctccacacagcagttcacactcacacacacgcgcgcgcgcgcgcatgcacgcacaccatccccacttaactcgccagtgagtgcggcccccagccccatctgcaatgctgctgacacgtctggctcgctctcctcatctcctccagcagcggagcctcctcccaccccgggctcgtgctcaatgggttctgattgtgcaccggccgcacactgggcatttcttggatggggcacactgacacgcgcgtacacacgcccccgacgcgcacgcgcccccgcgcgcactcacactcacccccgcgcacactcacgccgccggcgcgctgatgtgcagcgcaccgggctgcacctgcagccagaggattggactggagggtcgcagcgcgtggctcccgcctctggcaccgctgcccagcctctcccctagaagggattaaccacctcagaaagaccaaaggcagtcctgtccccttccccctccccaaaaatatccttttgtttaaaaggaaaaataaaaaaccatccaaaatagcaagtgcccggtgctgctggattggaaagctgtacccaataccaggttggttagcagtgccaaggcttcgagcctttatctgcctgatttctccaaaccctcaaaattgagactccaaagcgggcatttacgtaccggttctgcacctccgaggtggcagtctccggagaggggtggcgggtgtcgagggtttgagacgttttctttcctgcaaagcaggataaatggatcagtctcctgggttgggaagttcactacgactctttgcagagcagaaggaaatgtattcggatgccagctccgctggatgccggggatagaaaggcagcttgacccgagaagcgcttctccatagagccaagccccgagatttcctagaggtgaaggaacccaaggaagtggtgctggaaagggggtgggggaggaccttcctttctcaaaaagggggggggggagtggagaggcaagagagcccagattccagttggtggtgatgggagccgggggaggggaagcgggcgggggcaagtcaagcgttcggcagcaggagaggaagagcaggggaggagggggagagtaagaaaaatgggtattaatcaccggcgacgcggggagggcggggacatcaaaggtcctggtcttgatttgggtctcacacccaggaacgtgccactcaagcgcgcgctcgcgcgcgcacaccacacacacacacacacacacacacacacacacacacaccctacctctcacacaggaggttcaggaggagaaacccaagaggcagggtgtgtgtgcacgcgcgtcctcttgctctccaccccccacccctccccactcccaaaccccctccatcaccccctcactcccactgctaagactcttggctgaggctgcttctcacgtcatgagctgggggaagtggggtagccagggggtgggaaaagcttaacccgaggccgtggtgcctcctcctggcagcaagaaggaatagcagcgagatggggcggcttaagggagaggggaaacagtggccaccttggaccaccgcgcagggctgtgcacctcaacccgaaggccatgctgcagactg

SEQ ID NO: 8 - protein, 1484 aa, Homo sapiens [sequence omitted]

SEQ ID NO: 9 - protein, 1482 aa, Mus musculus
MKPSAECCSPKFWLVLAVLAVSGSKARSQKSAPSIGIAVILVGTSDEVAIKDAHEKDDFHHLSVVPRVELVAMNETDPKSIITRICDLMSDRKIQGVVFADDTDQEAIAQILDFISAQTLTPILGIHGGSSMIMADKDESSMFFQFGPSIEQQASVMLNIMEEYDWYIFSIVTTYFPGYQDFVNKIRSTIENSFVGWELEEVLLLDMSLDDGDSKIQNQLKKLQSPIILLYCTKEEATYIFEVANSVGLTGYGYTWIVPSLVAGDTDTVPSEFPTGLISVSYDEWDYGLPARVRDGIAIITTAASDMLSEHSFIPEPKSSCYNTHEKRIYQSNMLNRYLINVTFEGRNLSFSEDGYQMHPKLVIILLNKERKWERVGKWKDKSLQMKYYVWPRMCPETEEQEDDHLSIVTLEEAPFVIVESVDPLSGTCMRNTVPCQKRIISENKTDEEPGYIKKCCKGFCIDILKKISKSVKFTYDLYLVTNGKHGKKINGTWNGMIGEVVMKRAYMAVGSLTINEERSEVVDFSVPFIETGISVMVSRSNGTVSPSAFLEPFSADVWVMMFVMLLIVSAVAVFVFEYFSPVGYNRCLADGREPGGPSFTIGKAIWLLWGLVFNNSVPVQNPKGTTSKIMVSVWAFFAVIFLASYTANLAAFMIQEEYVDQVSGLSDKKFQRPNDFSPPFRFGTVPNGSTERNIRNNYAEMHAYMGKFNQRGVDDALLSLKTGKLDAFIYDAAVLNYMAGRDEGCKLVTIGSGKVFASTGYGIAIQKDSGWKRQVDLAILQLFGDGEMEELEALWLTGICHNEKNEVMSSQLDIDNMAGVFYMLGAAMALSLITFICEHLFYWQFRHCFMGVCSGKPGMVFSISRGIYSCIHGVAIEERQSVMNSPTATMNNTHSNILRLLRTAKNMANLSGVNGSPQSALDFIRRESSVYDISEHRRSFTHSDCKSYNNPPCEENLFSDYISEVERTFGNLQLKDSNVYQDHYHHHHRPHSIGSTSSIDGLYDCDNPPFTTQPRSISKKPLDIGLPSSKHSQLSDLYGKFSFKSDRYSGHDDLIRSDVSDISTHTVTYGNIEGNAAKRRKQQYKDSLKKRPASAKSRREFDEIELAYRRRPPRSPDHKRYFRDKEGLRDFYLDQFRTKENSPHWEHVDLTDIYKERSDDFKRDSVSGGGPCTNRSHLKHGTGDKHGVVGGVPAPWEKNLTNVDWEDRSGGNFCRSCPSKLHNYSSTVAGQNSGRQACIRCEACKKAGNLYDISEDNSLQELDQPAAPVAVSSNASTTKYPQSPTNSKAQKKNRNKLRRQHSYDTFVDLQKEEAALAPRSVSLKDKGRFMDGSPYAHMFEMPAGESSFANKSSVTTAGHHHNNPGSGYMLSKSLYPDRVTQNPFIPTFGDDQCLLHGSKSYFFRQPTVAGASKTRPDFRALVTNKPVVSALHGAVPGRFQKDICIGNQSNPCVPNNKNPRAFNGSSNGHVYEKLSSIESDV
